(19) United States
(12) Patent Application Publication
(10) Pub. No.: US 2024/0301425 A1
(43) Pub. Date: Sep. 12, 2024

(54) METHODS AND COMPOSITIONS FOR TREATING A PROPROTEIN CONVERTASE SUBTILISIN KEXIN (PCSK9) GENE-ASSOCIATED DISORDER

(71) Applicant: Alnylam Pharmaceuticals, Inc., Cambridge, MA (US)

(72) Inventor: Kevin Fitzgerald, Brookline, MA (US)

(21) Appl. No.: 18/507,175

(22) Filed: Nov. 13, 2023

Related U.S. Application Data
(63) Continuation of application No. 17/709,539, filed on Mar. 31, 2022, now abandoned.
Application No. 17/709,539 is a continuation of application No. 16/929,470, filed on Jul. 15, 2020, now abandoned.
Application No. 16/929,470 is a continuation of application No. 16/744,689, filed on Jan. 16, 2020, now Pat. No. 10,851,377.
Application No. 16/744,689 is a continuation of application No. 15/895,023, filed on Feb. 13, 2018, now abandoned.
Application No. 15/895,023 is a continuation of application No. PCT/US2016/048666, filed on Aug. 25, 2016.
(60) Provisional application No. 62/209,526, filed on Aug. 25, 2015.

(51) Int. Cl. C12N 15/113; A61K 9/00; A61K 31/7115; A61K 31/713; A61K 39/395; A61K 45/06; A61P 3/06

(52) U.S. Cl. CPC C12N 15/1137; A61K 9/0019; A61K 31/7115; A61K 31/713; A61K 39/3955; A61K 45/06; A61P 3/06; C12N 2310/14; C12N 2310/315; C12N 2310/321

(57) ABSTRACT

The invention relates to methods of inhibiting the expression of a PCSK9 gene in a subject, as well as therapeutic and prophylactic methods for treating subjects having a lipid disorder, such as a hyperlipidemia using RNAi agents, e.g., double-stranded RNAi agents, targeting the PCSK9 gene.

### RELATED APPLICATIONS

[0001] This application is a continuation of U.S. patent application Ser. No. 17/709,539, filed on Mar. 31, 2022, which is a continuation of U.S. patent application Ser. No. 16/929,470, filed on Jul. 15, 2020, abandoned, which is a continuation of U.S. patent application Ser. No. 16/744,689, filed on Jan. 16, 2020, now U.S. Pat. No. 10,851,377, issued on Dec. 1, 2020, which is a continuation of U.S. patent application Ser. No. 15/895,023, filed on Feb. 13, 2018, abandoned, which is a 35 § U.S.C. 111(a) continuation application which claims the benefit of priority to PCT/US2016/048666, filed on Aug. 25, 2016, which claims the benefit of priority to U.S. Provisional Patent Application No. 62/209,526, filed on Aug. 25, 2015. The entire contents of each of the foregoing patent applications are incorporated herein by reference.

[0002] This application is related to U.S. Provisional Application No. 61/733,518, filed on Dec. 5, 2012; U.S. Provisional Application No. 61/793,530, filed on Mar. 15, 2013; U.S. Provisional Application No. 61/886,916, filed on Oct. 4, 2013; U.S. Provisional Application No. 61/892,188, filed on Oct. 17, 2013; PCT Application No. PCT/US2013/073349, filed on Dec. 5, 2013; U.S. patent application Ser. No. 14/650,128, filed on Jun. 5, 2015, now U.S. Pat. No. 10,125,369, issued on Nov. 13, 2018, U.S. patent application Ser. No. 16/155,965, filed on Oct. 10, 2018, and U.S. patent application Ser. No. 17/586,850, filed on Jan. 28, 2022. The entire contents of each of the foregoing patent applications are hereby incorporated herein by reference.

### SEQUENCE LISTING

[0003] The instant application contains a Sequence Listing which has been submitted electronically in XML format and is hereby incorporated by reference in its entirety. Said XML copy, created on Nov. 3, 2023, is named 121301_04407_SL.xml and is 9,218,286 bytes in size. The sequence listing is part of the specification and is incorporated in its entirety by reference herein.

### BACKGROUND OF THE INVENTION

[0004] Proprotein convertase subtilisin kexin 9 (PCSK9) is a member of the subtilisin serine protease family. The other eight mammalian subtilisin proteases, PCSK1-PCSK8 (also called PC1/3, PC2, furin, PC4, PC5/6, PACE4, PC7, and S1P/SKI-1) are proprotein convertases that process a wide variety of proteins in the secretory pathway and play roles in diverse biological processes (Bergeron, F. (2000) J. Mol. Endocrinol. 24, 1-22, Gensberg, K., (1998) Semin. Cell Dev. Biol. 9, 11-17, Seidah, N. G. (1999) Brain Res. 848, 45-62, Taylor, N. A., (2003) FASEB J. 17, 1215-1227, and Zhou, A., (1999) J. Biol. Chem. 274, 20745-20748).

[0005] PCSK9 has been proposed to play a role in cholesterol metabolism. PCSK9 mRNA expression is down-regulated by dictary cholesterol feeding in mice (Maxwell, K. N., (2003) J. Lipid Res. 44, 2109-2119), up-regulated by statins in HepG2 cells (Dubuc, G., (2004) Arterioscler. Thromb. Vasc. Biol. 24, 1454-1459), and up-regulated in sterol regulatory element binding protein (SREBP) transgenic mice (Horton, J. D., (2003) Proc. Natl. Acad. Sci. USA 100, 12027-12032), similar to the cholesterol biosynthetic enzymes and the low-density lipoprotein receptor (LDLR). Furthermore, PCSK9 missense mutations have been found to be associated with a form of autosomal dominant hypercholesterolemia (Hchola3) (Abifadel, M., et al. (2003) Nat. Genet. 34, 154-156, Timms, K. M., (2004) Hum. Genet. 114, 349-353, Leren, T. P. (2004) Clin. Genet. 65, 419-422). PCSK9 may also play a role in determining LDL cholesterol levels in the general population, because single-nucleotide polymorphisms (SNPs) have been associated with cholesterol levels in a Japanese population (Shioji, K., (2004) J. Hum. Genet. 49, 109-114).

[0006] Autosomal dominant hypercholesterolemias (ADHs) are monogenic diseases in which patients exhibit elevated total and LDL cholesterol levels, tendon xanthomas, and premature atherosclerosis (Rader, D. J., (2003) J. Clin. Invest. 111, 1795-1803). The pathogenesis of ADHS and a recessive form, autosomal recessive hypercholesterolemia (ARH) (Cohen, J. C., (2003) Curr. Opin. Lipidol. 14, 121-127), is due to defects in LDL uptake by the liver. ADH may be caused by LDLR mutations, which prevent LDL uptake, or by mutations in the protein on LDL, apolipoprotein B, which binds to the LDLR. ARH is caused by mutations in the ARH protein that are necessary for endocytosis of the LDLR-LDL complex via its interaction with clathrin. Therefore, if PCSK9 mutations are causative in Hchola3 families, it seems likely that PCSK9 plays a role in receptor-mediated LDL uptake.

[0007] Overexpression studies point to a role for PCSK9 in controlling LDLR levels and, hence, LDL uptake by the liver (Maxwell, K. N. (2004) Proc. Natl. Acad. Sci. USA 101, 7100-7105, Benjannet, S., et al. (2004) J. Biol. Chem. 279, 48865-48875, Park, S. W., (2004) J. Biol. Chem. 279, 50630-50638). Adenoviral-mediated overexpression of mouse or human PCSK9 for 3 or 4 days in mice results in elevated total and LDL cholesterol levels; this effect is not seen in LDLR knockout animals (Maxwell, K. N. (2004) Proc. Natl. Acad. Sci. USA 101, 7100-7105, Benjannet, S., et al. (2004) J. Biol. Chem. 279, 48865-48875, Park, S. W., (2004) J. Biol. Chem. 279, 50630-50638). In addition, PCSK9 overexpression results in a severe reduction in hepatic LDLR protein, without affecting LDLR mRNA levels, SREBP protein levels, or SREBP protein nuclear to cytoplasmic ratio.

[0008] While hypercholesterolemia itself is asymptomatic, longstanding elevation of serum cholesterol can lead to atherosclerosis. Over a period of decades, chronically elevated serum cholesterol contributes to formation of atheromatous plaques in the arteries which can lead to progressive stenosis or even complete occlusion of the involved arteries. In addition, smaller plaques may rupture and cause a clot to form and obstruct blood flow resulting in, for example, myocardial infarction and/or stroke. If the formation of the stenosis or occlusion is gradual, blood supply to the tissues and organs slowly diminishes until organ function becomes impaired.

[0009] Accordingly, there is a need in the art for effective treatments for PCSK9-associated diseases, such as a hyperlipidemia, e.g., hypercholesterolemia.

### SUMMARY OF THE INVENTION

[0010] The present invention is based, at least in part, on the surprising discovery that a single dose of a double-stranded RNAi agent comprising chemical modifications shows an exceptional potency and durability to inhibit expression of PCSK9. Specifically, a single fixed dose, e.g., a fixed dose of about 300 mg to about 500 mg, of RNAi agents targeting a human PCSK9 gene, e.g., nucleotides 3544-3623 of a human PCSK9 gene (nucleotides 3544-3623 of SEQ ID NO:1), e.g., nucleotides 3601-3623 of SEQ ID NO:1, including a GalNAc ligand are shown herein to be exceptionally effective and durable in silencing the activity of a PCSK9 gene.

[0011] Accordingly, the present invention provides methods for inhibiting expression of a PCSK9 gene in a subject and methods for treating a subject having a disorder that would benefit from inhibiting or reducing the expression of a PCSK9 gene, e.g., a disorder mediated by PCSK9 expression, such as a hyperlipidemia, e.g., hypercholesterolemia, using iRNA compositions which effect the RNA-induced silencing complex (RISC)-mediated cleavage of RNA transcripts of a PCSK9 gene.

[0012] In one aspect, the methods of the present invention for inhibiting expression of a PCSK9 gene in a subject and methods for treating a subject having a disorder that would benefit from inhibiting or reducing the expression of a PCSK9 gene, e.g., a disorder mediated by PCSK9 expression, such as a hyperlipidemia, e.g., hypercholesterolemia, include administering to a subject a fixed dose of about 25 mg to about 800 mg of a double-stranded ribonucleic acid (RNAi) agent, wherein the double-stranded RNAi agent comprises a sense strand and an antisense strand forming a double stranded region, wherein the sense strand comprises at least 15 contiguous nucleotides differing by no more than 3 nucleotides from the nucleotide sequence of SEQ ID NO: 1 and the antisense strand comprises at least 15 contiguous nucleotides differing by no more than 3 nucleotides from the nucleotide sequence of SEQ ID NO:2, wherein substantially all of the nucleotides of the sense strand and substantially all of the nucleotides of the antisense strand are modified nucleotides, and wherein the sense strand is conjugated to a ligand attached at the 3′-terminus.

[0013] In one aspect, the present invention provides methods of inhibiting the expression of a PCSK9 gene in a subject. The methods include comprising administering to the subject a fixed dose of about 25 mg to about 800 mg of a double-stranded ribonucleic acid (RNAi) agent, wherein the double-stranded RNAi agent comprises a sense strand and an antisense strand forming a double stranded region, the antisense strand comprising a region of complementarity which comprises at least 15 contiguous nucleotides differing by no more than 3 nucleotides from nucleotides 3544-3623 of the nucleotide sequence of SEQ ID NO: 1, thereby inhibiting the expression of the PCSK9 gene in the subject.

[0014] In another aspect, the present invention provides methods of decreasing the level of low densiy lipoprotein (LDLc) in a subject, comprising administering to the subject a fixed dose of about 25 mg to about 800 mg of a double-stranded ribonucleic acid (RNAi) agent, wherein the double-stranded RNAi agent comprises a sense strand and an antisense strand forming a double stranded region, the antisense strand comprising a region of complementarity which comprises at least 15 contiguous nucleotides differing by no more than 3 nucleotides from nucleotides 3544-3623 of the nucleotide sequence of SEQ ID NO: 1, thereby decreasing the level of LDLc in the subject.

[0015] In another aspect, the present invention provides methods of treating a subject having a disorder that would benefit from reduction in PCSK9 expression. The methods include administering to the subject a fixed dose of about 25 mg to about 800 mg of a double-stranded ribonucleic acid (RNAi) agent, wherein the double-stranded RNAi agent comprises a sense strand and an antisense strand forming a double stranded region, the antisense strand comprising a region of complementarity which comprises at least 15 contiguous nucleotides differing by no more than 3 nucleotides from nucleotides 3544-3623 of the nucleotide sequence of SEQ ID NO: 1 thereby treating the subject having a disorder that would benefit from reduction in PCSK9 expression.

[0016] In yet another aspect, the present invention provides methods of treating a subject having hyperlipidemia. The methods include administering to the subject a fixed dose of about 25 mg to about 800 mg of a double-stranded ribonucleic acid (RNAi) agent, wherein the double-stranded RNAi agent comprises a sense strand and an antisense strand forming a double stranded region, the antisense strand comprising a region of complementarity which comprises at least 15 contiguous nucleotides differing by no more than 3 nucleotides from nucleotides 3544-3623 of the nucleotide sequence of SEQ ID NO:1, thereby treating the subject having hpercholesterolemia.

[0017] The fixed dose may administered to the subject at an interval of once a week, once every two weeks, once a month, once a quarter, or bianually.

[0018] In one embodiment, the subject is administered a fixed dose of about 25 mg to about 50 mg once a week. In another embodiment, the subject is administered a fixed dose of about 50 mg to about 100 mg once every two weeks. In another embodiment, the subject is administered a fixed dose of about 100 mg to about 200 mg once a month. In yet another embodiment, the subject is administered a fixed dose of about 300 mg to about 800 mg once a quarter. In another embodiment, the subject is administered a fixed dose of about 300 mg to about 800 mg biannually.

[0019] The present invention also provides methods in which the RNAi agent is administered in a dosing regimen that includes a loading phase and a maintenance phase.

[0020] Accordingly, in one aspect, the present invention provides methods of inhibiting the expression of a PCSK9 gene in a subject. The methods include administering to the subject a double-stranded ribonucleic acid (RNAi) agent in a dosing regimen that includes a loading phase followed by a maintenance phase, wherein the loading phase comprises administering a fixed dose of about 200 mg to about 600 mg of the RNAi agent to the subject, and wherein the maintenance phase comprises administering a fixed dose of about 25 mg to about 100 mg of the RNAi agent to the subject about once a month, wherein the double-stranded RNAi agent comprises a sense strand and an antisense strand forming a double stranded region, the antisense strand comprising a region of complementarity which comprises at least 15 contiguous nucleotides differing by no more than 3 nucleotides from nucleotides 3544-3623 of the nucleotide sequence of SEQ ID NO: 1, thereby inhibiting the expression of the PCSK9 gene in the subject.

[0021] In another aspect, the present invention provides methods of decreasing the level of low densiy lipoprotein (LDLc) in a subject. The methods include administering to the subject a double-stranded ribonucleic acid (RNAi) agent in a dosing regimen that includes a loading phase followed by a maintenance phase, wherein the loading phase comprises administering to the subject a fixed dose of about 200 mg to about 600 mg of the RNAi agent, and wherein the maintenance phase comprises administering to the subject a fixed dose of about 25 mg to about 100 mg of the RNAi agent once a month, wherein the double-stranded RNAi agent comprises a sense strand and an antisense strand forming a double stranded region, the antisense strand comprising a region of complementarity which comprises at least 15 contiguous nucleotides differing by no more than 3 nucleotides from nucleotides 3544-3623 of the nucleotide sequence of SEQ ID NO:1, thereby decreasing the level of LDLc in the subject.

[0022] In another aspect, the present invention provides methods of treating a subject having a disorder that would benefit from reduction in PCSK9 expression. The methods include administering to the subject a double-stranded ribonucleic acid (RNAi) agent in a dosing regimen that includes a loading phase followed by a maintenance phase, wherein the loading phase comprises administering to the subject a fixed dose of about 200 mg to about 600 mg of the RNAi agent, and wherein the maintenance phase comprises administering to the subject a fixed dose of about 25 mg to about 100 mg of the RNAi agent once a month, wherein the double-stranded RNAi agent comprises a sense strand and an antisense strand forming a double stranded region, the antisense strand comprising a region of complementarity which comprises at least 15 contiguous nucleotides differing by no more than 3 nucleotides from nucleotides 3544-3623 of the nucleotide sequence of SEQ ID NO: 1, thereby treating the subject having a disorder that would benefit from reduction in PCSK9 expression.

[0023] In yet another aspect, the present invention provides methods of treating a subject having hyperlipidemia. The methods include administering to the subject a double-stranded ribonucleic acid (RNAi) agent in a dosing regimen that includes a loading phase followed by a maintenance phase, wherein the loading phase comprises administering to the subject a fixed dose of about 200 mg to about 600 mg of the RNAi agent, and wherein the maintenance phase comprises administering to the subject a fixed dose of about 25 mg to about 100 mg of the RNAi agent once a month, wherein the double-stranded RNAi agent comprises a sense strand and an antisense strand forming a double stranded region, the antisense strand comprising a region of complementarity which comprises at least 15 contiguous nucleotides differing by no more than 3 nucleotides from nucleotides 3544-3623 of the nucleotide sequence of SEQ ID NO: 1, thereby treating the subject having hperlipidemia.

[0024] The double stranded RNAi agent may be administered to the subject subcutaneously, e.g., by subcutaneous injection, or intramuscularly.

[0025] In one embodiment, the antisense strand comprises a nucleotide sequence selected from the group consisting of any one of the unmodified nucleotide sequences provided in Table 1. In one embodiment, the double-stranded RNAi agent targets nucleotides 3601-3623 of SEQ ID NO:1. In one embodiment, the agent targeting nucleotides 3601-3623 of SEQ ID NO:1 is AD-60212.

[0026] In one embodiment, the antisense strand comprises the nucleotide sequence 5′-ACAAAAGCAAAACAGGUCUAGAA-3′ (SEQ ID NO: 685).

[0027] In one embodiment, the sense strand comprises the nucleotide sequence 5′-CUAGACCUGUTUUGCUUUUGU-3′ (SEQ ID NO: 686).

[0028] In one embodiment, the double-stranded ribonucleic acid RNAi agent comprises at least one modified nucleotide.

[0029] In one embodiment, substantially of the nucleotides of the sense strand are modified nucleotides. In another embodiment, substantially all of the nucleotides of the antisense strand are modified nucleotides. In yet another embodiment, substantially of the nucleotides of the sense strand and substantially all of the nucleotides of the antisense strand are modified nucleotides.

[0030] In one embodiment, all of the nucleotides of the sense strand are modified nucleotides. In another embodiment, all of the nucleotides of the antisense strand are modified nucleotides. In yet another embodiment, all of the nucleotides of the sense strand and all of the nucleotides of the antisense strand are modified nucleotides.

[0031] In one aspect, the present invention provides methods of inhibiting the expression of a PCSK9 gene in a subject. The methods include administering to the subject a fixed dose of about 25 mg to about 800 mg of a double-stranded ribonucleic acid (RNAi) agent, wherein the double-stranded RNAi agent comprises a sense strand and an antisense strand forming a double stranded region, wherein the antisense strand comprises the nucleotide sequence 5′-ACAAAAGCAAAACAGGUCUAGAA-3′ (SEQ ID NO: 685) and the sense strand comprises the nucleotide sequence 5′-CUAGACCUGUTUUGCUUUUGU-3′ (SEQ ID NO: 686), wherein substantially all of the nucleotides of the sense strand and substantially all of the nucleotides of the antisense strand are modified nucleotides, thereby inhibiting expression of the PCSK9 gene in the subject.

[0032] In another aspect, the present invention provides methods of decreasing the level of low densiy lipoprotein (LDLc) in a subject. The methods include administering to the subject a fixed dose of about 25 mg to about 800 mg of a double-stranded ribonucleic acid (RNAi) agent, wherein the double-stranded RNAi agent comprises a sense strand and an antisense strand forming a double stranded region, wherein the antisense strand comprises the nucleotide sequence 5′-ACAAAAGCAAAACAGGUCUAGAA-3′ (SEQ ID NO: 685) and the sense strand comprises the nucleotide sequence 5′-CUAGACCUGUTUUGCUUUUGU-3′ (SEQ ID NO: 686), wherein substantially all of the nucleotides of the sense strand and substantially all of the nucleotides of the antisense strand are modified nucleotides, thereby decreasing the level of LDLc in the subject.

[0033] In another aspect, the present invention provides methods of treating a subject having a disorder that would benefit from reduction in PCSK9 expression, comprising administering to the subject a fixed dose of about 25 mg to about 800 mg of a double-stranded ribonucleic acid (RNAi) agent, wherein the double-stranded RNAi agent comprises a sense strand and an antisense strand forming a double stranded region, wherein the antisense strand comprises the nucleotide sequence 5′-ACAAAAGCAAAACAGGUCUAGAA-3′ (SEQ ID NO: 685) and the sense strand comprises the nucleotide sequence 5′-CUAGACCUGUTUUGCUUUUGU-3′ (SEQ ID NO: 686), wherein substantially all of the nucleotides of the sense strand and substantially all of the nucleotides of the antisense strand are modified nucleotides, thereby treating the subject having a disorder that would benefit from reduction in PCSK9 expression.

[0034] In yet another aspect, the present invention provides methods of treating a subject having hyperlipidemia. The methods include administering to the subject a fixed dose of about 25 mg to about 800 mg of a double-stranded ribonucleic acid (RNAi) agent, wherein the double-stranded RNAi agent comprises a sense strand and an antisense strand forming a double stranded region, wherein the antisense strand comprises the nucleotide sequence 5′-ACAAAAGCAAAACAGGUCUAGAA-3′ (SEQ ID NO: 685) and the sense strand comprises the nucleotide sequence 5′-CUAGACCUGUTUUGCUUUUGU-3′ (SEQ ID NO: 686), wherein substantially all of the nucleotides of the sense strand and substantially all of the nucleotides of the antisense strand are modified nucleotides, thereby treating the subject having hyperlipidemia.

[0035] In one aspect, the present invention provides methods of inhibiting the expression of a PCSK9 gene in a subject. The methods include administering to the subject a fixed dose of about 25 mg to about 800 mg of a double-stranded ribonucleic acid (RNAi) agent, wherein the double-stranded RNAi agent comprises a sense strand and an antisense strand forming a double stranded region, wherein the antisense strand comprises the nucleotide sequence 5′-ACAAAAGCAAAACAGGUCUAGAA-3′ (SEQ ID NO: 685) and the sense strand comprises the nucleotide sequence 5′-CUAGACCUGUTUUGCUUUUGU-3′ (SEQ ID NO: 686), wherein substantially all of the nucleotides of the sense strand and substantially all of the nucleotides of the antisense strand are modified nucleotides, and administering to the subject a therapeutically effective amount of an anti-PCSK9 antibody, or antigen-binding fragment thereof, thereby inhibiting expression of the PCSK9 gene in the subject.

[0036] In another aspect, the present invention provides methods of decreasing the level of low densiy lipoprotein (LDLc) in a subject. The methods include administering to the subject a fixed dose of about 25 mg to about 800 mg of a double-stranded ribonucleic acid (RNAi) agent, wherein the double-stranded RNAi agent comprises a sense strand and an antisense strand forming a double stranded region, wherein the antisense strand comprises the nucleotide sequence 5′-ACAAAAGCAAAACAGGUCUAGAA-3′ (SEQ ID NO: 685) and the sense strand comprises the nucleotide sequence 5′-CUAGACCUGUTUUGCUUUUGU-3′ (SEQ ID NO: 686), wherein substantially all of the nucleotides of the sense strand and substantially all of the nucleotides of the antisense strand are modified nucleotides, and administering to the subject a therapeutically effective amount of an anti-PCSK9 antibody, or antigen-binding fragment thereof, thereby decreasing the level of LDLc in the subject.

[0037] In another aspect, the present invention provides methods of treating a subject having a disorder that would benefit from reduction in PCSK9 expression, comprising administering to the subject a fixed dose of about 25 mg to about 800 mg of a double-stranded ribonucleic acid (RNAi) agent, wherein the double-stranded RNAi agent comprises a sense strand and an antisense strand forming a double stranded region, wherein the antisense strand comprises the nucleotide sequence 5′-ACAAAAGCAAAACAGGUCUAGAA-3′(SEQ ID NO: 685) and the sense strand comprises the nucleotide sequence 5′-CUAGACCUGUTUUGCUUUUGU-3′ (SEQ ID NO: 686), wherein substantially all of the nucleotides of the sense strand and substantially all of the nucleotides of the antisense strand are modified nucleotides, and administering to the subject a therapeutically effective amount of an anti-PCSK9 antibody, or antigen-binding fragment thereof, thereby treating the subject having a disorder that would benefit from reduction in PCSK9 expression.

[0038] In yet another aspect, the present invention provides methods of treating a subject having hyperlipidemia. The methods include administering to the subject a fixed dose of about 25 mg to about 800 mg of a double-stranded ribonucleic acid (RNAi) agent, wherein the double-stranded RNAi agent comprises a sense strand and an antisense strand forming a double stranded region, wherein the antisense strand comprises the nucleotide sequence 5′-ACAAAAGCAAAACAGGUCUAGAA-3′ (SEQ ID NO: 685) and the sense strand comprises the nucleotide sequence 5′-CUAGACCUGUTUUGCUUUUGU-3′ (SEQ ID NO: 686), wherein substantially all of the nucleotides of the sense strand and substantially all of the nucleotides of the antisense strand are modified nucleotides, and administering to the subject a therapeutically effective amount of an anti-PCSK9 antibody, or antigen-binding fragment thereof, thereby treating the subject having hyperlipidemia.

[0039] The fixed dose may administered to the subject at an interval of once a week, once every two weeks, once a month, once a quarter, or bianually.

[0040] In one embodiment, the subject is administered a fixed dose of about 25 mg to about 50 mg once a week. In another embodiment, the subject is administered a fixed dose of about 50 mg to about 100 mg once every two weeks. In another embodiment, the subject is administered a fixed dose of about 100 mg to about 200 mg once a month. In yet another embodiment, the subject is administered a fixed dose of about 300 mg to about 800 mg once a quarter. In another embodiment, the subject is administered a fixed dose of about 300 mg to about 800 mg biannually.

[0041] In one aspect, the present invention provide methods of inhibiting the expression of a PCSK9 gene in a subject. The methods include administering to the subject a double-stranded ribonucleic acid (RNAi) agent in a dosing regimen that includes a loading phase followed by a maintenance phase, wherein the loading phase comprises administering a fixed dose of about 200 mg to about 600 mg of the RNAi agent to the subject, and wherein the maintenance phase comprises administering to the subject a fixed dose of about 25 mg to about 100 mg of the RNAi agent once a quarter, wherein the double-stranded RNAi agent comprises a sense strand and an antisense strand forming a double stranded region, wherein the antisense strand comprises the nucleotide sequence 5′-ACAAAAGCAAAACAGGUCUAGAA-3′ (SEQ ID NO: 685) and the sense strand comprises the nucleotide sequence 5′-CUAGACCUGUTUUGCUUUUGU-3′ (SEQ ID NO: 686), wherein substantially all of the nucleotides of the sense strand and substantially all of the nucleotides of the antisense strand are modified nucleotides, thereby inhibiting expression of the PCSK9 gene in the subject.

[0042] In another aspect, the present invention provides methods of decreasing the level of low densiy lipoprotein (LDLc) in a subject. The methods include administering to the subject a double-stranded ribonucleic acid (RNAi) agent in a dosing regimen that includes a loading phase followed by a maintenance phase, wherein the loading phase comprises administering a fixed dose of about 200 mg to about 600 mg of the RNAi agent to the subject, and wherein the maintenance phase comprises administering to the subject a fixed dose of about 25 mg to about 100 mg of the RNAi agent once a quarter, wherein the double-stranded RNAi agent comprises a sense strand and an antisense strand forming a double stranded region, wherein the antisense strand comprises the nucleotide sequence 5′-ACAAAAGCAAAACAGGUCUAGAA-3′ (SEQ ID NO: 685) and the sense strand comprises the nucleotide sequence 5′-CUAGACCUGUTUUGCUUUUGU-3′ (SEQ ID NO: 686), wherein substantially all of the nucleotides of the sense strand and substantially all of the nucleotides of the antisense strand are modified nucleotides, thereby decreasing the level of LDLc in the subject.

[0043] In another aspect, the present invention provides methods of treating a subject having a disorder that would benefit from reduction in PCSK9 expression. The methods include administering to the subject a double-stranded ribonucleic acid (RNAi) agent in a dosing regimen that includes a loading phase followed by a maintenance phase, wherein the loading phase comprises administering a fixed dose of about 200 mg to about 600 mg of the RNAi agent to the subject, and wherein the maintenance phase comprises administering to the subject a fixed dose of about 25 mg to about 100 mg of the RNAi agent once a quarter, wherein the double-stranded RNAi agent comprises a sense strand and an antisense strand forming a double stranded region, wherein the antisense strand comprises the nucleotide sequence 5′-ACAAAAGCAAAACAGGUCUAGAA-3′ (SEQ ID NO: 685) and the sense strand comprises the nucleotide sequence 5′-CUAGACCUGUTUUGCUUUUGU-3′ (SEQ ID NO: 686), wherein substantially all of the nucleotides of the sense strand and substantially all of the nucleotides of the antisense strand are modified nucleotides, thereby treating the subject having a disorder that would benefit from reduction in PCSK9 expression.

[0044] In yet another aspect, the present invention provides methods of treating a subject having hyperlipidemia. The methods include administering to the subject a double-stranded ribonucleic acid (RNAi) agent in a dosing regimen that includes a loading phase followed by a maintenance phase, wherein the loading phase comprises administering a fixed dose of about 200 mg to about 600 mg of the RNAi agent to the subject, and wherein the maintenance phase comprises administering to the subject a fixed dose of about 25 mg to about 100 mg of the RNAi agent once a quarter, wherein the double-stranded RNAi agent comprises a sense strand and an antisense strand forming a double stranded region, wherein the antisense strand comprises the nucleotide sequence 5′-ACAAAAGCAAAACAGGUCUAGAA-3′ (SEQ ID NO: 685) and the sense strand comprises the nucleotide sequence 5′-CUAGACCUGUTUUGCUUUUGU-3′ (SEQ ID NO: 686), wherein substantially all of the nucleotides of the sense strand and substantially all of the nucleotides of the antisense strand are modified nucleotides, thereby treating the subject having hyperlipidemia.

[0045] In one aspect, the present invention provide methods of inhibiting the expression of a PCSK9 gene in a subject. The methods include administering to the subject a double-stranded ribonucleic acid (RNAi) agent in a dosing regimen that includes a loading phase followed by a maintenance phase, wherein the loading phase comprises administering a fixed dose of about 200 mg to about 600 mg of the RNAi agent to the subject, and wherein the maintenance phase comprises administering to the subject a fixed dose of about 25 mg to about 100 mg of the RNAi agent once a quarter, wherein the double-stranded RNAi agent comprises a sense strand and an antisense strand forming a double stranded region, wherein the antisense strand comprises the nucleotide sequence 5′-ACAAAAGCAAAACAGGUCUAGAA-3′ (SEQ ID NO: 685) and the sense strand comprises the nucleotide sequence 5′-CUAGACCUGUTUUGCUUUUGU-3′ (SEQ ID NO: 686), wherein substantially all of the nucleotides of the sense strand and substantially all of the nucleotides of the antisense strand are modified nucleotides, and administering to the subject a therapeutically effective amount of an anti-PCSK9 antibody, or antigen-binding fragment thereof, thereby inhibiting expression of the PCSK9 gene in the subject.

[0046] In another aspect, the present invention provides methods of decreasing the level of low densiy lipoprotein (LDLc) in a subject. The methods include administering to the subject a double-stranded ribonucleic acid (RNAi) agent in a dosing regimen that includes a loading phase followed by a maintenance phase, wherein the loading phase comprises administering a fixed dose of about 200 mg to about 600 mg of the RNAi agent to the subject, and wherein the maintenance phase comprises administering to the subject a fixed dose of about 25 mg to about 100 mg of the RNAi agent once a quarter, wherein the double-stranded RNAi agent comprises a sense strand and an antisense strand forming a double stranded region, wherein the antisense strand comprises the nucleotide sequence 5′-ACAAAAGCAAAACAGGUCUAGAA-3′ (SEQ ID NO: 685) and the sense strand comprises the nucleotide sequence 5′-CUAGACCUGUTUUGCUUUUGU-3′ (SEQ ID NO: 686), wherein substantially all of the nucleotides of the sense strand and substantially all of the nucleotides of the antisense strand are modified nucleotides, and administering to the subject a therapeutically effective amount of an anti-PCSK9 antibody, or antigen-binding fragment thereof, thereby decreasing the level of LDLc in the subject.

[0047] In another aspect, the present invention provides methods of treating a subject having a disorder that would benefit from reduction in PCSK9 expression. The methods include administering to the subject a double-stranded ribonucleic acid (RNAi) agent in a dosing regimen that includes a loading phase followed by a maintenance phase, wherein the loading phase comprises administering a fixed dose of about 200 mg to about 600 mg of the RNAi agent to the subject, and wherein the maintenance phase comprises administering to the subject a fixed dose of about 25 mg to about 100 mg of the RNAi agent once a quarter, wherein the double-stranded RNAi agent comprises a sense strand and an antisense strand forming a double stranded region, wherein the antisense strand comprises the nucleotide sequence 5′-ACAAAAGCAAAACAGGUCUAGAA-3′ (SEQ ID NO: 685) and the sense strand comprises the nucleotide sequence 5′-CUAGACCUGUTUUGCUUUUGU-3′ (SEQ ID NO: 686), wherein substantially all of the nucleotides of the sense strand and substantially all of the nucleotides of the antisense strand are modified nucleotides, and administering to the subject a therapeutically effective amount of an anti-PCSK9 antibody, or antigen-binding fragment thereof, thereby treating the subject having a disorder that would benefit from reduction in PCSK9 expression.

[0048] In yet another aspect, the present invention provides methods of treating a subject having hyperlipidemia. The methods include administering to the subject a double-stranded ribonucleic acid (RNAi) agent in a dosing regimen that includes a loading phase followed by a maintenance phase, wherein the loading phase comprises administering a fixed dose of about 200 mg to about 600 mg of the RNAi agent to the subject, and wherein the maintenance phase comprises administering to the subject a fixed dose of about 25 mg to about 100 mg of the RNAi agent once a quarter, wherein the double-stranded RNAi agent comprises a sense strand and an antisense strand forming a double stranded region, wherein the antisense strand comprises the nucleotide sequence 5′-ACAAAAGCAAAACAGGUCUAGAA-3′ (SEQ ID NO: 685) and the sense strand comprises the nucleotide sequence 5′-CUAGACCUGUTUUGCUUUUGU-3′ (SEQ ID NO: 686), wherein substantially all of the nucleotides of the sense strand and substantially all of the nucleotides of the antisense strand are modified nucleotides, and administering to the subject a therapeutically effective amount of an anti-PCSK9 antibody, or antigen-binding fragment thereof, thereby treating the subject having hyperlipidemia.

[0049] In one embodiment, the subject is a human.

[0050] In one embodiment, the disorder that would benefit from reduction in PCSK9 expression is hyperlipidemia, such as hypercholesterolemia.

[0051] In one embodiment, the hyperlipidemia is hypercholesterolemia.

[0052] The double stranded RNAi agent may be administered to the subject subcutaneously, e.g., by subcutaneous injection, or intramuscularly.

[0053] In one embodiment, the sense strand comprises the nucleotide sequence of 5′-csusagacCfuGfudTuugcuuuugu-3′ (SEQ ID NO: 687) and the antisense strand comprises the nucleotide sequence of 5′-asCfsaAfAfAfgCfaAfaAfcAfgGfuCfuagsasa-3′ (SEQ ID NO: 688) (AD-60212), wherein a, g, c and u are 2′-O-methyl (2′-OMe) A, G, C, or U; Af, Gf, Cf or Uf are 2′-fluoro A, G, C or U; dT is 2′-deoxythymidine; and s is a phosphorothioate linkage.

[0054] In one embodiment, the double-stranded ribonucleic acid RNAi agent further comprises a ligand.

[0055] In one embodiment, the ligand is conjugated to the 3′ end of the sense strand of the double-stranded ribonucleic acid RNAi agent.

[0056] In one embodiment, the ligand is an N-acetylgalactosamine (GalNAc) derivative.

[0057] In one embodiment, the ligand is

[chemical structure]

[0058] In one embodiment, the double-stranded ribonucleic acid RNAi agent is conjugated to the ligand as shown in the following schematic

[chemical structure]

and, wherein X is O or S. In one embodiment, the X is O.

[0059] In one embodiment, PCSK9 expression is inhibited by at least about 30%.

[0060] In one embodiment, the methods of the invention further comprise determining an LDLR genotype or phenotype of the subject.

[0061] In one embodiment, administering the double-stranded RNAi agent results in a decrease in serum cholesterol in the subject and/or a decrease in PCSK9 protein accumulation.

[0062] In one embodiment, the methods of the invention further comprise determining the serum cholesterol level in the subject.

[0063] In one embodiment, the methods of the invention further comprise comprising administering an additional therapeutic agent to the subject, e.g., a statin and/or an anti-PCSK9 antibody. In one embodiment, the anti-PCSK9 antibody is selected from the group consisting of alirocumab (Praluent), evolocumab (Repatha), and bococizumab.

[0064] In one embodiment, the RNAi agent is administered as a pharmaceutical composition.

[0065] The RNAi agent may be administered in an unbuffered solution, such as saline or water., or administered with a buffer solution. In one embodiment, the buffer solution comprises acetate, citrate, prolamine, carbonate, or phosphate or any combination thereof. In another embodiment, the buffer solution is phosphate buffered saline (PBS).

[0066] In one aspect, the present invention provides methods of inhibiting the expression of a PCSK9 gene in a subject. The methods include administering to the subject a single fixed dose of about 25 mg to about 800 mg of a double-stranded ribonucleic acid (RNAi) agent, wherein the double-stranded RNAi agent comprises a sense strand and an antisense strand forming a double stranded region, wherein the sense strand comprises the nucleotide sequence of 5′-csusagacCfuGfudTuugcuuuugu-3′ (SEQ ID NO: 687) and the antisense strand comprises the nucleotide sequence of 5′-asCfsaAfAfAfgCfaAfaAfcAfgGfuCfuagsasa-3′ (SEQ ID NO: 688) (AD-60212), wherein a, g, c and u are 2′-O-methyl (2′-OMe) A, G, C, or U; Af, Gf, Cf or Uf are 2′-fluoro A, G, C or U; dT is 2-deoxythymidine; and s is a phosphorothioate linkage, and administering to the subject a therapeutically effective amount of an anti-PCSK9 antibody, or antigen-binding fragment thereof, thereby inhibiting expression of the PCSK9 gene in the subject.

[0067] In another aspect, the present invention provides methods of decreasing the level of low densiy lipoprotein (LDLc) in a subject. The methods include administering to the subject a fixed dose of about 25 mg to about 800 mg of a double-stranded ribonucleic acid (RNAi) agent, wherein the double-stranded RNAi agent comprises a sense strand and an antisense strand forming a double stranded region, wherein the sense strand comprises the nucleotide sequence of 5′-csusagacCfuGfudTuugcuuuugu-3′ (SEQ ID NO: 687) and the antisense strand comprises the nucleotide sequence of 5′-asCfsaAfAfAfgCfaAfaAfcAfgGfuCfuagsasa-3′ (SEQ ID NO: 688) (AD-60212), wherein a, g, c and u are 2′-O-methyl (2′-OMe) A, G, C, or U; Af, Gf, Cf or Uf are 2′-fluoro A, G, C or U; dT is 2′-deoxythymidine; and s is a phosphorothioate linkage, and administering to the subject a therapeutically effective amount of an anti-PCSK9 antibody, or antigen-binding fragment thereof, thereby decreasing the level of LDLc in the subject.

[0068] In another aspect, the present invention provides methods of treating a subject having a disorder that would benefit from reduction in PCSK9 expression. The methods include administering to the subject a fixed dose of about 25 mg to about 800 mg of a double-stranded ribonucleic acid (RNAi) agent, wherein the double-stranded RNAi agent comprises a sense strand and an antisense strand forming a double stranded region, wherein the sense strand comprises the nucleotide sequence of 5′-csusagacCfuGfudTuugcuuuugu-3′ (SEQ ID NO: 687) and the antisense strand comprises the nucleotide sequence of 5′-asCfsaAfAfAfgCfaAfaAfcAfgGfuCfuagsasa-3′ (SEQ ID NO: 688) (AD-60212), wherein a, g, c and u are 2′-O-methyl (2′-OMc) A, G. C, or U; Af, Gf, Cf or Uf are 2′-fluoro A, G, C or U; dT is 2′-deoxythymidine; and s is a phosphorothioate linkage, and administering to the subject a therapeutically effective amount of an anti-PCSK9 antibody, or antigen-binding fragment thereof, thereby treating the subject having a disorder that would benefit from reduction in PCSK9 expression.

[0069] In yet another aspect, the present invention provides methods of treating a subject having hyperlipidemia. The methods include administering to the subject a fixed dose of about 25 mg to about 800 mg of a double-stranded ribonucleic acid (RNAi) agent, wherein the double-stranded RNAi agent comprises a sense strand and an antisense strand forming a double stranded region, wherein the sense strand comprises the nucleotide sequence of 5′-csusagacCfuGfudTuugcuuuugu-3′ (SEQ ID NO: 687) and the antisense strand comprises the nucleotide sequence of 5′-asCfsaAfAfAfgCfaAfaAfcAfgGfuCfuagsasa-3′ (SEQ ID NO: 688) (AD-60212), wherein a, g, c and u are 2′-O-methyl (2′-OMe) A, G, C, or U; Af, Gf, Cf or Uf are 2′-fluoro A, G, C or U; dT is 2′-deoxythymidine; and s is a phosphorothioate linkage, and administering to the subject a therapeutically effective amount of an anti-PCSK9 antibody, or antigen-binding fragment thereof, thereby treating the subject having hyperlipidemia.

[0070] In one embodiment, the subject is administered a fixed dose of about 200 mg to about 800 mg once a quarter. In another embodiment, the subject is administered a fixed dose of about 200 mg to about 800 mg biannually.

[0071] In one aspect, the present invention provides methods of inhibiting the expression of a PCSK9 gene in a subject. The methods include administering to the subject a double-stranded ribonucleic acid (RNAi) agent in a dosing regimen that includes a loading phase followed by a maintenance phase, wherein the loading phase comprises administering a fixed dose of about 200 mg to about 600 mg of the RNAi agent to the subject, and wherein the maintenance phase comprises administering to the subject a fixed dose of about 25 mg to about 800 mg of the RNAi agent once a quarter, wherein the double-stranded RNAi agent comprises a sense strand and an antisense strand forming a double stranded region, wherein the sense strand comprises the nucleotide sequence of 5′-csusagacCfuGfudTuugcuuuugu-3′ (SEQ ID NO: 687) and the antisense strand comprises the nucleotide sequence of 5′-asCfsaAfAfAfgCfaAfaAfcAfgGfuCfuagsasa-3′ (SEQ ID NO: 688) (AD-60212), wherein a, g, c and u are 2′-O-methyl (2′-OMe) A. G. C, or U; Af, Gf, Cf or Uf are 2′-fluoro A, G, C or U; dT is 2′-deoxythymidine; and s is a phosphorothioate linkage, and administering to the subject a therapeutically effective amount of an anti-PCSK9 antibody, or antigen-binding fragment thereof, thereby inhibiting expression of the PCSK9 gene in the subject.

[0072] In another aspect, the present invention provides methods of decreasing the level of low densiy lipoprotein (LDLc) in a subject. The methods include administering to the subject a double-stranded ribonucleic acid (RNAi) agent in a dosing regimen that includes a loading phase followed by a maintenance phase, wherein the loading phase comprises administering a fixed dose of about 200 mg to about 600 mg of the RNAi agent to the subject, and wherein the maintenance phase comprises administering to the subject a fixed dose of about 25 mg to about 100 mg of the RNAi agent once a quarter, wherein the double-stranded RNAi agent comprises a sense strand and an antisense strand forming a double stranded region, wherein the sense strand comprises the nucleotide sequence of 5′-csusagacCfuGfudTuugcuuuugu-3′ (SEQ ID NO: 687) and the antisense strand comprises the nucleotide sequence of 5′-asCfsaAfAfAfgCfaAfaAfcAfgGfuCfuagsasa-3′ (SEQ ID NO: 688) (AD-60212), wherein a, g, c and u are 2′-O-methyl (2′-OMe) A, G, C, or U; Af, Gf, Cf or Uf are 2′-fluoro A, G, C or U; dT is 2′-deoxythymidine; and s is a phosphorothioate linkage, and administering to the subject a therapeutically effective amount of an anti-PCSK9 antibody, or antigen-binding fragment thereof, thereby decreasing the level of LDLc in the subject.

[0073] In yet another aspect, the present invention provides methods of treating a subject having a disorder that would benefit from reduction in PCSK9 expression. The methods include administering to the subject a double-stranded ribonucleic acid (RNAi) agent in a dosing regimen that includes a loading phase followed by a maintenance phase, wherein the loading phase comprises administering a fixed dose of about 200 mg to about 600 mg of the RNAi agent to the subject, and wherein the maintenance phase comprises administering to the subject a fixed dose of about 25 mg to about 100 mg of the RNAi agent once a quarter, wherein the double-stranded RNAi agent comprises a sense strand and an antisense strand forming a double stranded region, wherein the sense strand comprises the nucleotide sequence of 5′-csusagacCfuGfudTuugcuuuugu-3′ (SEQ ID NO: 687) and the antisense strand comprises the nucleotide sequence of 5′-asCfsaAfAfAfgCfaAfaAfcAfgGfuCfuagsasa-3′ (SEQ ID NO: 688) (AD-60212), wherein a, g, c and u are 2′-O-methyl (2′-OMe) A, G, C, or U; Af, Gf, Cf or Uf are 2′-fluoro A, G, C or U; dT is 2′-deoxythymidine; and s is a phosphorothioate linkage, and administering to the subject a therapeutically effective amount of an anti-PCSK9 antibody, or antigen-binding fragment thereof, thereby treating the subject having a disorder that would benefit from reduction in PCSK9 expression.

[0074] In another aspect, the present invention provides methods of treating a subject having hyperlipidemia. The methods include administering to the subject a double-stranded ribonucleic acid (RNAi) agent in a dosing regimen that includes a loading phase followed by a maintenance phase, wherein the loading phase comprises administering a fixed dose of about 200 mg to about 600 mg of the RNAi agent to the subject, and wherein the maintenance phase comprises administering to the subject a fixed dose of about 25 mg to about 100 mg of the RNAi agent once a quarter, wherein the double-stranded RNAi agent comprises a sense strand and an antisense strand forming a double stranded region, wherein the sense strand comprises the nucleotide sequence of 5′-csusagacCfuGfudTuugcuuuugu-3′ (SEQ ID NO: 687) and the antisense strand comprises the nucleotide sequence of 5′-asCfsaAfAfAfgCfaAfaAfcAfgGfuCfuagsasa-3′ (SEQ ID NO: 688) (AD-60212), wherein a, g, c and u are 2′-O-methyl (2′-OMe) A, G, C, or U; Af, Gf, Cf or Uf are 2′-fluoro A, G, C or U; dT is 2′-deoxythymidine; and s is a phosphorothioate linkage, and administering to the subject a therapeutically effective amount of an anti-PCSK9 antibody, or antigen-binding fragment thereof, thereby treating the subject having hyperlipidemia.

[0075] In one embodiment, the subject is administered the maintenance does as a fixed dose of about 200 mg to about 800 mg once a quarter. In another embodiment, the subject is administered the maintenance does as a fixed dose of about 200 mg to about 800 mg biannually.

[0076] In one embodiment, the double-stranded ribonucleic acid RNAi agent further comprises a ligand.

[0077] In one embodiment, the ligand is conjugated to the 3′ end of the sense strand of the double-stranded ribonucleic acid RNAi agent.

[0078] In one embodiment, the ligand is an N-acetylgalactosamine (GalNAc) derivative.

[0079] In one embodiment, the ligand is

[chemical structure]

[0080] In one embodiment, the double-stranded ribonucleic acid RNAi agent is conjugated to the ligand as shown in the following schematic

[chemical structure]

and, wherein X is O or S. In one embodiment, the X is O.

[0081] In one embodiment, the anti-PCSK9 antibody, or antigen-binding fragment thereof, is selected from the group consisting of alirocumab (Praluent), evolocumab (Repatha), and bococizumab.

[0082] In one embodiment, the methods further include administering an additional therapeutic agent, e.g., a statin, to the subject.

[0083] In one aspect, the present invention provides kits for performing the method of the invention. The kits include the RNAi agent, and instructions for use, and optionally, means for administering the RNAi agent to the subject.

[0084] The present invention is further illustrated by the following detailed description and drawings.

### BRIEF DESCRIPTION OF THE DRAWINGS

[0085] FIG. 1 is a graph showing the knockdown of PCSK9 protein levels, shown as a percent mean PCSK9 knockdown relative to baseline, in subjects receiving a single fixed dose of AD-60212.

[0086] FIG. 2 is a graph showing the lowering of LDL-c levels, shown as a percent mean LCL-C lowering relative to baseline, in subjects receiving a single fixed dose of AD-60212.

[0087] FIG. 3 is a graph showing the knockdown of PCSK9 protein levels, shown as a percent mean PCSK9 knockdown relative to baseline, in subjects receiving multiple fixed doses of AD-60212.

[0088] FIG. 4 is a graph showing the lowering of LDL-c levels, shown as a percent mean LCL-C lowering relative to baseline, in subjects receiving multiple fixed doses of AD-60212.

### DETAILED DESCRIPTION OF THE INVENTION

[0089] The present invention is based, at least in part, on the surprising discovery that a single dose of a double-stranded RNAi agent comprising chemical modifications shows an exceptional potency and durability to inhibit expression of PCSK9. Specifically, a single fixed dose, e.g., a fixed dose of about 300 mg to about 500 mg, of RNAi agents targeting a human PCSK9 gene, e.g., nucleotides 3544-3623 of a human PCSK9 gene (nucleotides 3544-3623 of SEQ ID NO:1), e.g., nucleotides 3601-3623 of SEQ ID NO:1, including a GalNAc ligand are shown herein to be exceptionally effective and durable in silencing the activity of a PCSK9 gene.

[0090] Accordingly, the present invention provides methods for inhibiting expression of a PCSK9 gene and methods for treating a subject having a disorder that would benefit from inhibiting or reducing the expression of a PCSK9 gene, e.g., a disorder mediated by PCSK9 expression, such as a hyperlipidemia, e.g., hypercholesterolemia, using iRNA compositions which effect the RNA-induced silencing complex (RISC)-mediated cleavage of RNA transcripts of a PCSK9 gene.

[0091] The following detailed description discloses how to make and use compositions containing iRNAs to inhibit the expression of a PCSK9 gene, as well as compositions, uses, and methods for treating subjects having diseases and disorders that would benefit from inhibition and/or reduction of the expression of this gene.

### I. DEFINITIONS

[0092] In order that the present invention may be more readily understood, certain terms are first defined. In addition, it should be noted that whenever a value or range of values of a parameter are recited, it is intended that values and ranges intermediate to the recited values are also intended to be part of this invention.

[0093] The articles “a” and “an” are used herein to refer to one or to more than one (i.e., to at least one) of the grammatical object of the article. By way of example, “an element” means one element or more than one element, e.g., a plurality of elements.

[0094] The term “including” is used herein to mean, and is used interchangeably with, the phrase “including but not limited to”.

[0095] The term “or” is used herein to mean, and is used interchangeably with, the term “and/or,” unless context clearly indicates otherwise. For example, “sense strand or antisense strand” is understood as “sense strand or antisense strand or sense strand and antisense strand.”

[0096] The term “about” is used herein to mean within the typical ranges of tolerances in the art. For example, “about” can be understood as about 2 standard deviations from the mean. In certain embodiments, about means+10%. In certain embodiments, about means+5%. When about is present before a series of numbers or a range, it is understood that “about” can modify each of the numbers in the series or range.

[0097] The term “at least” prior to a number or series of numbers is understood to include the number adjacent to the term “at least”, and all subsequent numbers or integers that could logically be included, as clear from context. For example, the number of nucleotides in a nucleic acid molecule must be an integer. For example, “at least 18 nucleotides of a 21 nucleotide nucleic acid molecule” means that 18, 19, 20, or 21 nucleotides have the indicated property. When at least is present before a series of numbers or a range, it is understood that “at least” can modify each of the numbers in the series or range.

[0098] As used herein, “no more than” or “less than” is understood as the value adjacent to the phrase and logical lower values or intergers, as logical from context, to zero. For example, a duplex with an overhang of “no more than 2 nucleotides” has a 2, 1, or 0 nucleotide overhang. When “no more than” is present before a series of numbers or a range, it is understood that “no more than” can modify each of the numbers in the series or range.

[0099] As used herein, “PCSK9” refers to the proprotein convertase subtilisin kexin 9 gene or protein. PCSK9 is also known as FH3, HCHOLA3, NARC-1, or NARCl. The term PCSK9 includes human PCSK9, the amino acid and nucleotide sequence of which may be found in, for example, GenBank Accession No. GI:299523249 (SEQ ID NO:1); mouse PCSK9, the amino acid and nucleotide sequence of which may be found in, for example, GenBank Accession No. GI:163644257; rat PCSK9, the amino acid and nucleotide sequence of which may be found in, for example, GenBank Accession No. GI:77020249.

[0100] Additional examples of PCSK9 mRNA sequences are readily available using publicly available databases, e.g., GenBank, UniProt, and OMIM.

[0101] In one embodiment, the subject is a human, such as a human being treated or assessed for a disease, disorder or condition that would benefit from reduction in PCSK9 expression; a human at risk for a disease, disorder or condition that would benefit from reduction in PCSK9 expression; a human having a disease, disorder or condition that would benefit from reduction in PCSK9 expression; and/or human being treated for a disease, disorder or condition that would benefit from reduction in PCSK9 expression as described herein.

[0102] As used herein, the terms “treating” or “treatment” refer to a beneficial or desired result including, but not limited to, alleviation or amelioration of one or more symptoms associated with a disorder that would benefit from reduction in PCSK9 expression, or slowing or reversing the progression of such a disorder, whether detectable or undetectable. For example, in the context of hyperlipidemia, treatment may include a decrease in serum lipid levels, e.g., a decrease in low density lipoprotein cholesterol (LDLc). “Treatment” can also mean prolonging survival as compared to expected survival in the absence of treatment.

[0103] As used herein, “prevention” or “preventing,” when used in reference to a disease, disorder or condition thereof, that would benefit from a reduction in expression of a PCSK9 gene, refers to a reduction in the likelihood that a subject will develop a symptom associated with a disease, disorder, or condition mediated by PCSK9 expression, e.g., a symptom such as cardiovascular disease, e.g., coronary artery disease (CAD) (also known as coronary heart disease (CHD)), or transient ischemic attack (TIA) or stroke. The likelihood of developing a such a symptom is reduced, for example, when an individual having one or more risk factors (e.g., diabetes, previous personal history of CHD or noncoronary atherosclerosis (e.g., abdominal aortic aneurysm, peripheral artery disease, and carotid artery stenosis), family history of cardiovascular disease, e.g., in male relatives younger than 50 years or in female relatives younger than age 60 years, tobacco use, hypertension, and/or obesity (BMI≥30)) for a disease, disorder, or condition mediated by PCSK9 expression, e.g., hypercholesterolemia, either fails to develop, for example, coronary artery disease, or develops, e.g., coronary artery disease, with less severity relative to a population having the same risk factors and not receiving treatment as described herein. The failure to develop a disease, disorder or condition, or the reduction in the development of a symptom associated with such a disease, disorder or condition (e.g., by at least about 10% on a clinically accepted scale for that disease or disorder), or the exhibition of delayed symptoms delayed (e.g., by days, weeks, months or years) is considered effective prevention. Prevention can require administration of more than one dose.

[0104] The interchangeably used terms “PCSK9-associated disease” and “disorder that would benefit from a reduction in PCSK9 expression,” as used herein, are intended to include any disease, disorder, or condition associated with the PCSK9 gene or protein. Such a disease may be caused, for example, by excess production of the PCSK9 protein, by PCSK9 gene mutations, by abnormal cleavage of the PCSK9 protein, by abnormal interactions between PCSK9 and other proteins or other endogenous or exogenous substances. Exemplary PCSK9-associated diseases include lipidemias, e.g., a hyperlipidemia, and other forms of lipid imbalance such as hypercholesterolemia, hypertriglyceridemia and the pathological conditions associated with these disorders, e.g., CHD and atherosclerosis.

[0105] As used herein the term “hypercholesterolemia” refers to a form of hyperlipidemia (elevated levels of lipids in the blood) in which there are high levels of cholesterol in the serum of a subject, e.g., at least about 240 mg/dL of total cholesterol.

[0106] As used herein, the term “cardiovascular disease” refers to a disease affecting the heart or blood vessels, which includes, for example, arteriosclerosis, coronary artery disease (or narrowing of the arteries), heart valve disease, arrhythmia, heart failure, hypertension, orthostatic hypotension, shock, endocarditis, diseases of the aorta and its branches, disorders of the peripheral vascular system, heart attack, cardiomyopathy, and congenital heart disease.

[0107] “Therapeutically effective amount,” as used herein, is intended to include the amount of an RNAi agent that, when administered to a patient for treating a PCSK9 associated disease, is sufficient to effect treatment of the disease (e.g., by diminishing, ameliorating or maintaining the existing disease or one or more symptoms of disease). The “therapeutically effective amount” may vary depending on the RNAi agent, how the agent is administered, the disease and its severity and the history, age, weight, family history, genetic makeup, stage of pathological processes mediated by PCSK9 expression, the types of preceding or concomitant treatments, if any, and other individual characteristics of the patient to be treated.

[0108] “Prophylactically effective amount,” as used herein, is intended to include the amount of an RNAi agent that, when administered to a subject who does not yet experience or display symptoms of a PCSK9-associated disease, but who may be predisposed to the disease, is sufficient to prevent or ameliorate the disease or one or more symptoms of the disease. Ameliorating the disease includes slowing the course of the disease or reducing the severity of later-developing disease. The “prophylactically effective amount” may vary depending on the RNAi agent, how the agent is administered, the degree of risk of disease, and the history, age, weight, family history, genetic makeup, the types of preceding or concomitant treatments, if any, and other individual characteristics of the patient to be treated.

[0109] A “therapeutically-effective amount” or “prophylacticaly effective amount” also includes an amount of an RNAi agent that produces some desired local or systemic effect at a reasonable benefit/risk ratio applicable to any treatment. RNAi gents employed in the methods of the present invention may be administered in a sufficient amount to produce a reasonable benefit/risk ratio applicable to such treatment.

[0110] As used herein, “target sequence” refers to a contiguous portion of the nucleotide sequence of an mRNA molecule formed during the transcription of a PCSK9 gene, including mRNA that is a product of RNA processing of a primary transcription product. In one embodiment, the target portion of the sequence will be at least long enough to serve as a substrate for iRNA-directed cleavage at or near that portion of the nucleotide sequence of an mRNA molecule formed during the transcription of a PCSK9 gene.

[0111] The target sequence may be from about 9-36 nucleotides in length, e.g., about 15-30 nucleotides in length. For example, the target sequence can be from about 15-30 nucleotides, 15-29, 15-28, 15-27, 15-26, 15-25, 15-24, 15-23, 15-22, 15-21, 15-20, 15-19, 15-18, 15-17, 18-30, 18-29, 18-28, 18-27, 18-26, 18-25, 18-24, 18-23, 18-22, 18-21, 18-20, 19-30, 19-29, 19-28, 19-27, 19-26, 19-25, 19-24, 19-23, 19-22, 19-21, 19-20, 20-30, 20-29, 20-28, 20-27, 20-26, 20-25, 20-24, 20-23, 20-22, 20-21, 21-30, 21-29, 21-28, 21-27, 21-26, 21-25, 21-24, 21-23, or 21-22 nucleotides in length. In some embodiments, the target sequence is about 19 to about 30 nucleotides in length. In other embodiments, the target sequence is about 19 to about 25 nucleotides in length. In still other embodiments, the target sequence is about 19 to about 23 nucleotides in length. In some embodiments, the target sequence is about 21 to about 23 nucleotides in length. Ranges and lengths intermediate to the above recited ranges and lengths are also contemplated to be part of the invention.

[0112] As used herein, the term “strand comprising a sequence” refers to an oligonucleotide comprising a chain of nucleotides that is described by the sequence referred to using the standard nucleotide nomenclature.

[0113] “G,” “C,” “A,” “T” and “U” each generally stand for a nucleotide that contains guanine, cytosine, adenine, thymidine and uracil as a base, respectively. However, it will be understood that the term “ribonucleotide” or “nucleotide” can also refer to a modified nucleotide, as further detailed below, or a surrogate replacement moiety (see, e.g., Table B). The skilled person is well aware that guanine, cytosine, adenine, and uracil can be replaced by other moieties without substantially altering the base pairing properties of an oligonucleotide comprising a nucleotide bearing such replacement moiety. For example, without limitation, a nucleotide comprising inosine as its base can base pair with nucleotides containing adenine, cytosine, or uracil. Hence, nucleotides containing uracil, guanine, or adenine can be replaced in the nucleotide sequences of dsRNA featured in the invention by a nucleotide containing, for example, inosine. In another example, adenine and cytosine anywhere in the oligonucleotide can be replaced with guanine and uracil, respectively to form G-U Wobble base pairing with the target mRNA. Sequences containing such replacement moieties are suitable for the compositions and methods featured in the invention.

[0114] The terms “iRNA”, “RNAi agent.” “iRNA agent,” “RNA interference agent” as used interchangeably herein, refer to an agent that contains RNA as that term is defined herein, and which mediates the targeted cleavage of an RNA transcript via an RNA-induced silencing complex (RISC) pathway. iRNA directs the sequence-specific degradation of mRNA through a process known as RNA interference (RNAi). The iRNA modulates, e.g., inhibits, the expression of PCSK9 in a cell, e.g., a cell within a subject, such as a mammalian subject.

[0115] In one embodiment, an RNAi agent of the invention includes a single stranded RNA that interacts with a target RNA sequence, e.g., a PCSK9 target mRNA sequence, to direct the cleavage of the target RNA. Without wishing to be bound by theory it is believed that long double stranded RNA introduced into cells is broken down into siRNA by a Type III endonuclease known as Dicer (Sharp et al. (2001) Genes Dev. 15:485). Dicer, a ribonuclease-III-like enzyme, processes the dsRNA into 19-23 base pair short interfering RNAs with characteristic two base 3′ overhangs (Bernstein, et al., (2001) Nature 409:363). The siRNAs are then incorporated into an RNA-induced silencing complex (RISC) where one or more helicases unwind the siRNA duplex, enabling the complementary antisense strand to guide target recognition (Nykanen, et al., (2001) Cell 107:309). Upon binding to the appropriate target mRNA, one or more endonucleases within the RISC cleave the target to induce silencing (Elbashir, et al., (2001) Genes Dev. 15:188). Thus, in one aspect the invention relates to a single stranded RNA (siRNA) generated within a cell and which promotes the formation of a RISC complex to effect silencing of the target gene, i.e., a PCSK9 gene. Accordingly, the term “siRNA” is also used herein to refer to an RNAi as described above.

[0116] In another embodiment, the RNAi agent may be a single-stranded siRNA that is introduced into a cell or organism to inhibit a target mRNA. Single-stranded RNAi agents bind to the RISC endonuclease, Argonaute 2, which then cleaves the target mRNA. The single-stranded siRNAs are generally 15-30 nucleotides and are chemically modified. The design and testing of single-stranded siRNAs are described in U.S. Pat. No. 8,101,348 and in Lima et al., (2012) Cell 150: 883-894, the entire contents of each of which are hereby incorporated herein by reference. Any of the antisense nucleotide sequences described herein may be used as a single-stranded siRNA as described herein or as chemically modified by the methods described in Lima et al., (2012) Cell 150:883-894.

[0117] In another embodiment, an “iRNA” for use in the compositions, uses, and methods of the invention is a double-stranded RNA and is referred to herein as a “double stranded RNAi agent,” “double-stranded RNA (dsRNA) molecule,” “dsRNA agent,” or “dsRNA”. The term “dsRNA” refers to a complex of ribonucleic acid molecules, having a duplex structure comprising two anti-parallel and substantially complementary nucleic acid strands, referred to as having “sense” and “antisense” orientations with respect to a target RNA, i.e., a PCSK9 gene. In some embodiments of the invention, a double-stranded RNA (dsRNA) triggers the degradation of a target RNA, e.g., an mRNA, through a post-transcriptional gene-silencing mechanism referred to herein as RNA interference or RNAi.

[0118] In general, the majority of nucleotides of each strand of a dsRNA molecule are ribonucleotides, but as described in detail herein, each or both strands can also include one or more non-ribonucleotides, e.g., a deoxyribonucleotide and/or a modified nucleotide. In addition, as used in this specification, an “RNAi agent” may include ribonucleotides with chemical modifications; an RNAi agent may include substantial modifications at multiple nucleotides. Such modifications may include all types of modifications disclosed herein or known in the art. Any such modifications, as used in a siRNA type molecule, are encompassed by “RNAi agent” for the purposes of this specification and claims.

[0119] The duplex region may be of any length that permits specific degradation of a desired target RNA through a RISC pathway, and may range from about 9 to 36 base pairs in length. e.g., about 15-30 base pairs in length, for example, about 9, 10, 11, 12, 13, 14, 15, 16, 17, 18, 19, 20, 21, 22, 23, 24, 25, 26, 27, 28, 29, 30, 31, 32, 33, 34, 35, or 36 base pairs in length, such as about 15-30, 15-29, 15-28, 15-27, 15-26, 15-25, 15-24, 15-23, 15-22, 15-21, 15-20, 15-19, 15-18, 15-17, 18-30, 18-29, 18-28, 18-27, 18-26, 18-25, 18-24, 18-23, 18-22, 18-21, 18-20, 19-30, 19-29, 19-28, 19-27, 19-26, 19-25, 19-24, 19-23, 19-22, 19-21, 19-20, 20-30, 20-29, 20-28, 20-27, 20-26, 20-25, 20-24, 20-23, 20-22, 20-21, 21-30, 21-29, 21-28, 21-27, 21-26, 21-25, 21-24, 21-23, or 21-22 base pairs in length. Ranges and lengths intermediate to the above recited ranges and lengths are also contemplated to be part of the invention.

[0120] The two strands forming the duplex structure may be different portions of one larger RNA molecule, or they may be separate RNA molecules. Where the two strands are part of one larger molecule, and therefore are connected by an uninterrupted chain of nucleotides between the 3′-end of one strand and the 5′-end of the respective other strand forming the duplex structure, the connecting RNA chain is referred to as a “hairpin loop.” A hairpin loop can comprise at least one unpaired nucleotide. In some embodiments, the hairpin loop can comprise at least 2, at least 3, at least 4, at least 5, at least 6, at least 7, at least 8, at least 9, at least 10, at least 20, at least 23 or more unpaired nucleotides. In some embodiments, the hairpin loop can be 10 or fewer nucleotides. In some embodiments, the hairpin loop can be 8 or fewer unpaired nucleotides. In some embodiments, the hairpin loop can be 4-10 unpaired nucleotides. In some embodiments, the hairpin loop can be 4-8 nucleotides.

[0121] Where the two substantially complementary strands of a dsRNA are comprised by separate RNA molecules, those molecules need not, but can be covalently connected. Where the two strands are connected covalently by means other than an uninterrupted chain of nucleotides between the 3′-end of one strand and the 5′-end of the respective other strand forming the duplex structure, the connecting structure is referred to as a “linker.” The RNA strands may have the same or a different number of nucleotides. The maximum number of base pairs is the number of nucleotides in the shortest strand of the dsRNA minus any overhangs that are present in the duplex. In addition to the duplex structure, an RNAi may comprise one or more nucleotide overhangs. In one embodiment of the RNAi agent, at least one strand comprises a 3′ overhang of at least 1 nucleotide. In another embodiment, at least one strand comprises a 3′ overhang of at least 2 nucleotides, e.g., 2, 3, 4, 5, 6, 7, 9, 10, 11, 12, 13, 14, or 15 nucleotides. In other embodiments, at least one strand of the RNAi agent comprises a 5′ overhang of at least 1 nucleotide. In certain embodiments, at least one strand comprises a 5′ overhang of at least 2 nucleotides, e.g., 2, 3, 4, 5, 6, 7, 9, 10, 11, 12, 13, 14, or 15 nucleotides. In still other embodiments, both the 3′ and the 5′ end of one strand of the RNAi agent comprise an overhang of at least 1 nucleotide.

[0122] In one embodiment, an RNAi agent of the invention is a dsRNA agent, each strand of which comprises 19-23 nucleotides that interacts with a target RNA sequence, i.e., a PCSK9 target mRNA sequence. Without wishing to be bound by theory, long double stranded RNA introduced into cells is broken down into siRNA by a Type III endonuclease known as Dicer (Sharp et al. (2001) Genes Dev. 15:485). Dicer, a ribonuclease-III-like enzyme, processes the dsRNA into 19-23 base pair short interfering RNAs with characteristic two base 3′ overhangs (Bernstein, et al., (2001) Nature 409:363). The siRNAs are then incorporated into an RNA-induced silencing complex (RISC) where one or more helicases unwind the siRNA duplex, enabling the complementary antisense strand to guide target recognition (Nykanen, et al., (2001) Cell 107:309). Upon binding to the appropriate target mRNA, one or more endonucleases within the RISC cleave the target to induce silencing (Elbashir, et al., (2001) Genes Dev. 15:188).

[0123] In another embodiment, an RNAi agent of the invention is a dsRNA of 24-30 nucleotides that interacts with a target RNA sequence, e.g., a PCSK9 target mRNA sequence, to direct the cleavage of the target RNA. Without wishing to be bound by theory, long double stranded RNA introduced into cells is broken down into siRNA by a Type III endonuclease known as Dicer (Sharp et al. (2001) Genes Dev. 15:485). Dicer, a ribonuclease-III-like enzyme, processes the dsRNA into 19-23 base pair short interfering RNAs with characteristic two base 3′ overhangs (Bernstein, et al., (2001) Nature 409:363). The siRNAs are then incorporated into an RNA-induced silencing complex (RISC) where one or more helicases unwind the siRNA duplex, enabling the complementary antisense strand to guide target recognition (Nykanen, et al., (2001) Cell 107:309). Upon binding to the appropriate target mRNA, one or more endonucleases within the RISC cleave the target to induce silencing (Elbashir, et al., (2001) Genes Dev. 15:188).

[0124] As used herein, the term “nucleotide overhang” refers to at least one unpaired nucleotide that protrudes from the duplex structure of an iRNA, e.g., a dsRNA. For example, when a 3′-end of one strand of a dsRNA extends beyond the 5′-end of the other strand, or vice versa, there is a nucleotide overhang. A dsRNA can comprise an overhang of at least one nucleotide; alternatively the overhang can comprise at least two nucleotides, at least three nucleotides, at least four nucleotides, at least five nucleotides or more. A nucleotide overhang can comprise or consist of a nucleotide/nucleoside analog, including a deoxynucleotide/nucleoside. The overhang(s) can be on the sense strand, the antisense strand or any combination thereof. Furthermore, the nucleotide(s) of an overhang can be present on the 5′-end, 3′-end or both ends of either an antisense or sense strand of a dsRNA.

[0125] In one embodiment of the dsRNA, at least one strand comprises a 3′ overhang of at least 1 nucleotide. In another embodiment, at least one strand comprises a 3′ overhang of at least 2 nucleotides, e.g., 2, 3, 4, 5, 6, 7, 9, 10, 11, 12, 13, 14, or 15 nucleotides. In other embodiments, at least one strand of the RNAi agent comprises a 5′ overhang of at least 1 nucleotide. In certain embodiments, at least one strand comprises a 5′ overhang of at least 2 nucleotides, e.g., 2, 3, 4, 5, 6, 7, 9, 10, 11, 12, 13, 14, or 15 nucleotides. In still other embodiments, both the 3′ and the 5′ end of one strand of the RNAi agent comprise an overhang of at least 1 nucleotide. In certain embodiments, the antisense strand of a dsRNA has a 1-10 nucleotide, e.g., 0-3, 1-3, 2-4, 2-5, 4-10, 5-10, e.g., a 1, 2, 3, 4, 5, 6, 7, 8, 9, or 10 nucleotide, overhang at the 3′-end and/or the 5′-end. In one embodiment, the sense strand of a dsRNA has a 1-10 nucleotide, e.g., a 1, 2, 3, 4, 5, 6, 7, 8, 9, or 10 nucleotide, overhang at the 3′-end and/or the 5′-end. In another embodiment, one or more of the nucleotides in the overhang is replaced with a nucleoside thiophosphate.

[0126] In certain embodiments, the overhang on the sense strand or the antisense strand, or both, can include extended lengths longer than 10 nucleotides, e.g., 1-30 nucleotides, 2-30 nucleotides, 10-30 nucleotides, or 10-15 nucleotides in length. In certain embodiments, an extended overhang is on the sense strand of the duplex. In certain embodiments, an extended overhang is present on the 3′end of the sense strand of the duplex. In certain embodiments, an extended overhang is present on the 5′end of the sense strand of the duplex. In certain embodiments, an extended overhang is on the antisense strand of the duplex. In certain embodiments, an extended overhang is present on the 3′end of the antisense strand of the duplex. In certain embodiments, an extended overhang is present on the 5′end of the antisense strand of the duplex. In certain embodiments, one or more of the nucleotides in the overhang is replaced with a nucleoside thiophosphate. In certain embodiments, the overhang includes a self-complementary portion such that the overhang is capable of forming a hairpin structure that is stable under physiological conditions.

[0127] “Blunt” or “blunt end” means that there are no unpaired nucleotides at that end of the double stranded RNAi agent, i.e., no nucleotide overhang. A “blunt ended” RNAi agent is a dsRNA that is double-stranded over its entire length, i.e., no nucleotide overhang at either end of the molecule. The RNAi agents of the invention include RNAi agents with nucleotide overhangs at one end (i.e., agents with one overhang and one blunt end) or with nucleotide overhangs at both ends.

[0128] The term “antisense strand” or “guide strand” refers to the strand of an iRNA, e.g., a dsRNA, which includes a region that is substantially complementary to a target sequence, e.g., a PCSK9 mRNA. As used herein, the term “region of complementarity” refers to the region on the antisense strand that is substantially complementary to a sequence, for example a target sequence, e.g., a PCSK9 nucleotide sequence, as defined herein. Where the region of complementarity is not fully complementary to the target sequence, the mismatches can be in the internal or terminal regions of the molecule. Generally, the most tolerated mismatches are in the terminal regions, e.g., within 5, 4, 3, 2, or 1 nucleotides of the 5′- and/or 3′-terminus of the iRNA. In one embodiment, a double stranded RNAi agent of the invention includes a nucleotide mismatch in the antisense strand. In another embodiment, a double stranded RNAi agent of the invention includes a nucleotide mismatch in the sense strand. In one embodiment, the nucleotide mismatch is, for example, within 5, 4, 3, 2, or 1 nucleotides from the 3′-terminus of the iRNA. In another embodiment, the nucleotide mismatch is, for example, in the 3′-terminal nucleotide of the iRNA.

[0129] The term “sense strand,” or “passenger strand” as used herein, refers to the strand of an iRNA that includes a region that is substantially complementary to a region of the antisense strand as that term is defined herein.

[0130] As used herein, the term “cleavage region” refers to a region that is located immediately adjacent to the cleavage site. The cleavage site is the site on the target at which cleavage occurs. In some embodiments, the cleavage region comprises three bases on either end of, and immediately adjacent to, the cleavage site. In some embodiments, the cleavage region comprises two bases on either end of, and immediately adjacent to, the cleavage site. In some embodiments, the cleavage site specifically occurs at the site bound by nucleotides 10 and 11 of the antisense strand, and the cleavage region comprises nucleotides 11, 12 and 13.

[0131] As used herein, and unless otherwise indicated, the term “complementary,” when used to describe a first nucleotide sequence in relation to a second nucleotide sequence, refers to the ability of an oligonucleotide or polynucleotide comprising the first nucleotide sequence to hybridize and form a duplex structure under certain conditions with an oligonucleotide or polynucleotide comprising the second nucleotide sequence, as will be understood by the skilled person. Such conditions can, for example, be stringent conditions, where stringent conditions can include: 400 mM NaCl, 40 mM PIPES pH 6.4, 1 mM EDTA, 50° C. or 70° C. for 12-16 hours followed by washing (see, e.g., “Molecular Cloning: A Laboratory Manual, Sambrook, et al. (1989) Cold Spring Harbor Laboratory Press). Other conditions, such as physiologically relevant conditions as can be encountered inside an organism, can apply. The skilled person will be able to determine the set of conditions most appropriate for a test of complementarity of two sequences in accordance with the ultimate application of the hybridized nucleotides.

[0132] Complementary sequences within an iRNA, e.g., within a dsRNA as described herein, include base-pairing of the oligonucleotide or polynucleotide comprising a first nucleotide sequence to an oligonucleotide or polynucleotide comprising a second nucleotide sequence over the entire length of one or both nucleotide sequences. Such sequences can be referred to as “fully complementary” with respect to each other herein. However, where a first sequence is referred to as “substantially complementary” with respect to a second sequence herein, the two sequences can be fully complementary, or they can form one or more, but generally not more than 5, 4, 3 or 2 mismatched base pairs upon hybridization for a duplex up to 30 base pairs, while retaining the ability to hybridize under the conditions most relevant to their ultimate application, e.g., inhibition of gene expression via a RISC pathway. However, where two oligonucleotides are designed to form, upon hybridization, one or more single stranded overhangs, such overhangs shall not be regarded as mismatches with regard to the determination of complementarity. For example, a dsRNA comprising one oligonucleotide 21 nucleotides in length and another oligonucleotide 23 nucleotides in length, wherein the longer oligonucleotide comprises a sequence of 21 nucleotides that is fully complementary to the shorter oligonucleotide, can yet be referred to as “fully complementary” for the purposes described herein.

[0133] “Complementary” sequences, as used herein, can also include, or be formed entirely from, non-Watson-Crick base pairs and/or base pairs formed from non-natural and modified nucleotides, in so far as the above requirements with respect to their ability to hybridize are fulfilled. Such non-Watson-Crick base pairs include, but are not limited to, G:U Wobble or Hoogstein base pairing.

[0134] The terms “complementary.” “fully complementary” and “substantially complementary” herein can be used with respect to the base matching between the sense strand and the antisense strand of a dsRNA, or between the antisense strand of an iRNA agent and a target sequence, as will be understood from the context of their use.

[0135] As used herein, a polynucleotide that is “substantially complementary to at least part of” a messenger RNA (mRNA) refers to a polynucleotide that is substantially complementary to a contiguous portion of the mRNA of interest (e.g., an mRNA encoding PCSK9). For example, a polynucleotide is complementary to at least a part of a PCSK9 mRNA if the sequence is substantially complementary to a non-interrupted portion of an mRNA encoding PCSK9.

[0136] In general, the majority of nucleotides of each strand are ribonucleotides, but as described in detail herein, each or both strands can also include one or more non-ribonucleotides, e.g., a deoxyribonucleotide and/or a modified nucleotide. In addition, an “iRNA” may include ribonucleotides with chemical modifications. Such modifications may include all types of modifications disclosed herein or known in the art. Any such modifications, as used in an iRNA molecule, are encompassed by “iRNA” for the purposes of this specification and claims.

[0137] In one aspect of the invention, an agent for use in the methods and compositions of the invention is a single-stranded antisense RNA molecule that inhibits a target mRNA via an antisense inhibition mechanism. The single-stranded antisense RNA molecule is complementary to a sequence within the target mRNA. The single-stranded antisense oligonucleotides can inhibit translation in a stoichiometric manner by base pairing to the mRNA and physically obstructing the translation machinery, see Dias, N. et al., (2002) Mol Cancer Ther 1:347-355. The single-stranded antisense RNA molecule may be about 15 to about 30 nucleotides in length and have a sequence that is complementary to a target sequence. For example, the single-stranded antisense RNA molecule may comprise a sequence that is at least about 15, 16, 17, 18, 19, 20, or more contiguous nucleotides from any one of the antisense sequences described herein.

### II. METHODS OF THE INVENTION

[0138] The present invention provides methods of inhibiting the expression of a Proprotein Convertase Subtilisin Kexin 9 (PCSK9) gene in a subject. The present invention also provides therapeutic and prophylactic methods for treating or preventing diseases and conditions that can be modulated by down regulating PCSK9 gene expression. For example, the compositions described herein can be used to treat lipidemia, e.g., a hyperlipidemia and other forms of lipid imbalance such as hypercholesterolemia, hypertriglyceridemia and the pathological conditions associated with these disorders such as heart and circulatory diseases. Other diseases and conditions that can be modulated by down regulating PCSK9 gene expression include lysosomal storage diseases including, but not limited to, Niemann-Pick disease, Tay-Sachs disease, Lysosomal acid lipase deficiency, and Gaucher Disease. The methods include administering to the subject a therapeutically effective amount or prophylactically effective amount of an RNAi agent of the invention. In some embodiments, the method includes administering an effective amount of a PCSK9 iRNA agent to a patient having a heterozygous LDLR genotype.

[0139] As PCSK9 regulates the levels of the LDL receptor, which in turn removes cholesterol-rich LDL particles from the plasma, the effect of the decreased expression of a PCSK9 gene preferably results in a decrease in LDLc (low density lipoprotein cholesterol) levels in the blood, and more particularly in the serum, of the mammal. In some embodiments, LDLc levels are decreased by at least 10%, 15%, 20%, 25%, 30%, 40%, 50%, 60%, 70%, 80%, 90% or more, as compared to pretreatment levels. Accordingly, the present invention also provides methods for lowering the level of low density cholesterol (LDLc) in the serum of a subject.

[0140] In certain embodiments of the invention, the double-stranded RNAi agent is administered to a subject as a fixed dose. A “fixed dose” (e.g., a dose in mg) means that one dose of an iRNA agent is used for all subjects regardless of any specific subject-related factors, such as weight. In other embodiments, an iRNA agent of the invention is administered to a subject as a weight-based dose. A “weight-based dose” (e.g., a dose in mg/kg) is a dose of the iRNA agent that will change depending on the subject's weight.

[0141] In certain embodiments of an RNAi agent is administered to the subject as a fixed dose of about 100 mg to about 700 mg, about 150 mg to about 700 mg, about 200 mg to about 700 mg, about 250 mg to about 700 mg, about 300 mg to about 700 mg, about 350 mg to about 700 mg, about 400 mg to about 700 mg, about 450 mg to about 700 mg, about 500 mg to about 700 mg, about 550 mg to about 700 mg, about 600 to about 700 mg, about 650 to about 700 mg, about 100 mg to about 650 mg, about 150 mg to about 650 mg, about 200 mg to about 650 mg, about 250 mg to about 650 mg, about 300 mg to about 650 mg, about 350 mg to about 650 mg, about 400 mg to about 650 mg, about 450 mg to about 650 mg, about 500 mg to about 650 mg, about 550 mg to about 650 mg, about 600 to about 650 mg, about 100 mg to about 600 mg, about 150 mg to about 600 mg, about 200 mg to about 600 mg, about 250 mg to about 600 mg, about 300 mg to about 600 mg, about 350 mg to about 600 mg, about 400 mg to about 600 mg, about 450 mg to about 600 mg, about 500 mg to about 600 mg, about 550 mg to about 600 mg, about 100 mg to about 550 mg, about 150 mg to about 550 mg, about 200 mg to about 550 mg, about 250 mg to about 550 mg, about 300 mg to about 550 mg, about 350 mg to about 550 mg, about 400 mg to about 550 mg, about 450 mg to about 550 mg, about 500 mg to about 550 mg, about 100 mg to about 500 mg, about 150 mg to about 500 mg, about 200 mg to about 500 mg, about 250 mg to about 500 mg, about 300 mg to about 500 mg, about 350 mg to about 500 mg, about 400 mg to about 500 mg, or about 450 mg to about 500 mg. e.g., a fixed dose of about 100 mg, about 125 mg, about 150 mg, about 175 mg. 200 mg, about 225 mg, about 250 mg, about 275 mg, about 300 mg, about 325 mg, about 350 mg, about 375 mg, about 400 mg, about 425 mg, about 450 mg, about 475 mg, about 500 mg, about 525 mg, about 550 mg, about 575 mg, about 600 mg, about 625 mg, about 650 mg, about 675 mg, or about 700 mg. Values and ranges intermediate to the foregoing recited values are also intended to be part of this invention.

[0142] The administration may be repeated, for example, on a regular basis. For example, the fixed dose may administered to the subject at an interval of once a week, once every two weeks, once a month, once a quarter, or bianually for six months or a year or longer, i.e., chronic administration.

[0143] In one embodiment, the subject is administered a fixed dose of about 25 mg to about 50 mg once a week. In another embodiment, the subject is administered a fixed dose of about 50 mg to about 100 mg once every two weeks. In another embodiment, the subject is administered a fixed dose of about 100 mg to about 200 mg once a month. In yet another embodiment, the subject is administered a fixed dose of about 300 mg to about 600 mg once a quarter. In another embodiment, the subject is administered a fixed dose of about 300 mg to about 600 mg biannually (i.e., twice a year).

[0144] Accordingly, in one aspect, the present invention provides methods of inhibiting the expression of a PCSK9 gene in a subject. The methods include administering to the subject a double-stranded ribonucleic acid (RNAi) agent, e.g., a dsRNA, of the invention (e.g., a pharmaceutical composition comprising a dsRNA of the invention), wherein a total of about 200 mg to about 600 mg of the double-stranded RNAi agent is administered to the subject every quarter or biannually, and wherein the double-stranded RNAi agent comprises a sense strand and an antisense strand forming a double stranded region, the antisense strand comprising a region of complementarity which comprises at least 15 contiguous nucleotides differing by no more than 3 nucleotides from nucleotides 3544-3623 of the nucleotide sequence of SEQ ID NO:1.

[0145] In another aspect, the present invention provides methods of decreasing the level of low densiy lipoprotein (LDLc) in a subject. The methods include administering to the subject a double-stranded ribonucleic acid (RNAi) agent, wherein a total of about 200 mg to about 600 mg of the double-stranded RNAi agent is administered to the subject every quarter or biannually, and wherein the double-stranded RNAi agent comprises a sense strand and an antisense strand forming a double stranded region, the antisense strand comprising a region of complementarity which comprises at least 15 contiguous nucleotides differing by no more than 3 nucleotides from nucleotides 3544-3623 of the nucleotide sequence of SEQ ID NO: 1, thereby decreasing the level of LDLc in the subject.

[0146] In another aspect, the present invention provides methods of treating a subject having a disorder that would benefit from reduction in PCSK9 expression, such as a hyperlipidemia, e.g., hypercholesterolemia. The methods include administering to the subject a double-stranded ribonucleic acid (RNAi) agent, e.g., a dsRNA, of the invention (e.g., a pharmaceutical composition comprising a dsRNA of the invention), wherein a total of about 200 mg to about 600 mg of the double-stranded RNAi agent is administered to the subject every quarter or biannually, and wherein the double-stranded RNAi agent comprises a sense strand and an antisense strand forming a double stranded region, the antisense strand comprising a region of complementarity which comprises at least 15 contiguous nucleotides differing by no more than 3 nucleotides from nucleotides 3544-3623 of the nucleotide sequence of SEQ ID NO:1.

[0147] In yet another aspect, the present invention provides methods of treating a subject having hyperlipidemia, such as hypercholestrolemia. The methods include administering to the subject a double-stranded ribonucleic acid (RNAi) agent, e.g., a dsRNA, of the invention (e.g., a pharmaceutical composition comprising a dsRNA of the invention), wherein a total of about 200 mg to about 600 mg of the double-stranded RNAi agent is administered to the subject every quarter or biannually, and wherein the double-stranded RNAi agent comprises a sense strand and an antisense strand forming a double stranded region, the antisense strand comprising a region of complementarity which comprises at least 15 contiguous nucleotides differing by no more than 3 nucleotides from nucleotides 3544-3623 of the nucleotide sequence of SEQ ID NO: 1.

[0148] As indicated above, the administration of the RNAi agents to a subject may be repeated on a regular basis, for example, at an interval of once a week, once every two weeks, once a month, once a quarter, or bianually.

[0149] Accordingly, in some embodiments, the RNAi agent is administered in a dosing regimen that includes a “loading phase” of closely spaced administrations that may be followed by a “maintenance phase”, in which the RNAi agent is administered at longer spaced intervals. For example, after administration weekly or biweekly for one month, administration can be repeated once per month, for six months or a year or longer, i.e., chronic administration.

[0150] In one embodiment, the loading phase comprises a single administration of the RNAi agent during the first week. In another embodiment, the loading phase comprises a single administration of the RNAi agent during the first two weeks. In yet another embodiment, the loading phase comprises a single administration of the RNAi agent during the first month.

[0151] In certain embodiments of an RNAi agent is administered to the subject during a loading phase as a fixed dose of about 100 mg to about 700 mg, about 150 mg to about 700 mg, about 200 mg to about 700 mg, about 250 mg to about 700 mg, about 300 mg to about 700 mg, about 350 mg to about 700 mg, about 400 mg to about 700 mg, about 450 mg to about 700 mg, about 500 mg to about 700 mg, about 550 mg to about 700 mg, about 600 to about 700 mg, about 650 to about 700 mg, about 100 mg to about 650 mg, about 150 mg to about 650 mg, about 200 mg to about 650 mg, about 250 mg to about 650 mg, about 300 mg to about 650 mg, about 350 mg to about 650 mg, about 400 mg to about 650 mg, about 450 mg to about 650 mg, about 500 mg to about 650 mg, about 550 mg to about 650 mg, about 600 to about 650 mg, about 100 mg to about 600 mg, about 150 mg to about 600 mg, about 200 mg to about 600 mg, about 250 mg to about 600 mg, about 300 mg to about 600 mg, about 350 mg to about 600 mg, about 400 mg to about 600 mg, about 450 mg to about 600 mg, about 500 mg to about 600 mg, about 550 mg to about 600 mg, about 100 mg to about 550 mg, about 150 mg to about 550 mg, about 200 mg to about 550 mg, about 250 mg to about 550 mg, about 300 mg to about 550 mg, about 350 mg to about 550 mg, about 400 mg to about 550 mg, about 450 mg to about 550 mg, about 500 mg to about 550 mg, about 100 mg to about 500 mg, about 150 mg to about 500 mg, about 200 mg to about 500 mg, about 250 mg to about 500 mg, about 300 mg to about 500 mg, about 350 mg to about 500 mg, about 400 mg to about 500 mg, or about 450 mg to about 500 mg, e.g., a fixed dose of about 100 mg, about 125 mg, about 150 mg, about 175 mg. 200 mg, about 225 mg, about 250 mg, about 275 mg, about 300 mg, about 325 mg, about 350 mg, about 375 mg, about 400 mg, about 425 mg, about 450 mg, about 475 mg, about 500 mg, about 525 mg, about 550 mg, about 575 mg, about 600 mg, about 625 mg, about 650 mg, about 675 mg, or about 700 mg. Values and ranges intermediate to the foregoing recited values are also intended to be part of this invention.

[0152] In one embodiment, the maintenance phase comprises administration of a dose of the RNAi agent to the subject once a month, once every two months, once every three months, once every four months, once every five months, or once every six months. In one particular embodiment, the maintenance dose is administered to the subject once a month.

[0153] The maintenance dose or doses can be the same or lower than the initial dose, e.g., one-half of the initial dose. For example, a maintenance dose may be about 25 mg to about 100 mg administered to the subject monthly, for example about 25 mg to about 75 mg, about 25 mg to about 50 mg, or about 50 mg to about 75 mg, e.g., about 25 mg, about 30 mg, about 35 mg, about 40 mg, about 45 mg, about 50 mg, about 55 mg, about 60 mg, about 65 mg, about 70 mg, about 75 mg, about 80 mg, about 85 mg, about 90 mg, about 95 mg, or about 100 mg. Values and ranges intermediate to the foregoing recited values are also intended to be part of this invention.

[0154] Any of these schedules may optionally be repeated for one or more iterations. The number of iterations may depend on the achievement of a desired effect, e.g., the suppression of a PCSK9 gene, and/or the achievement of a therapeutic or prophylactic effect, e.g., reducing serum cholesterol levels or reducing a symptom of hypercholesterolemia. Following treatment, the patient can be monitored for changes in his/her condition. The dosage of the RNAi agent may either be increased in the event the patient does not respond significantly to current dosage levels, or the dose may be decreased if an alleviation of the symptoms of the disease state is observed, if the disease state has been ablated, or if undesired side-effects are observed.

[0155] Accordingly, in one aspect, the present invention provides methods of inhibiting the expression of a PCSK9 gene in a subject. The methods include administering to the subject a double-stranded ribonucleic acid (RNAi) agent in a dosing regimen that includes a loading phase followed by a maintenance phase, wherein the loading phase comprises administering a fixed dose of about 200 mg to about 600 mg of the RNAi agent to the subject, and wherein the maintenance phase comprises administering a fixed dose of about 25 mg to about 100 mg of the RNAi agent to the subject about once a month, wherein the double-stranded RNAi agent comprises a sense strand and an antisense strand forming a double stranded region, the antisense strand comprising a region of complementarity which comprises at least 15 contiguous nucleotides differing by no more than 3 nucleotides from nucleotides 3544-3623 of the nucleotide sequence of SEQ ID NO: 1, thereby inhibiting the expression of the PCSK9 gene in the subject.

[0156] In another aspect, the present invention provides method s of decreasing the level of low densiy lipoprotein (LDLc) in a subject. The methods include administering to the subject a double-stranded ribonucleic acid (RNAi) agent in a dosing regimen that includes a loading phase followed by a maintenance phase, wherein the loading phase comprises administering to the subject a fixed dose of about 200 mg to about 600 mg of the RNAi agent, and wherein the maintenance phase comprises administering to the subject a fixed dose of about 25 mg to about 100 mg of the RNAi agent once a month, wherein the double-stranded RNAi agent comprises a sense strand and an antisense strand forming a double stranded region, the antisense strand comprising a region of complementarity which comprises at least 15 contiguous nucleotides differing by no more than 3 nucleotides from nucleotides 3544-3623 of the nucleotide sequence of SEQ ID NO: 1, thereby decreasing the level of LDLc in the subject.

[0157] In another aspect, the present invention provides methods of treating a subject having a disorder that would benefit from reduction in PCSK9 expression. The methods include administering to the subject a double-stranded ribonucleic acid (RNAi) agent in a dosing regimen that includes a loading phase followed by a maintenance phase, wherein the loading phase comprises administering to the subject a fixed dose of about 200 mg to about 600 mg of the RNAi agent, and wherein the maintenance phase comprises administering to the subject a fixed dose of about 25 mg to about 100 mg of the RNAi agent once a month, wherein the double-stranded RNAi agent comprises a sense strand and an antisense strand forming a double stranded region, the antisense strand comprising a region of complementarity which comprises at least 15 contiguous nucleotides differing by no more than 3 nucleotides from nucleotides 3544-3623 of the nucleotide sequence of SEQ ID NO:1, thereby treating the subject having a disorder that would benefit from reduction in PCSK9 expression.

[0158] In yet another aspect, the present invention provides methods of treating a subject having hyperlipidemia. The methods include administering to the subject a double-stranded ribonucleic acid (RNAi) agent in a dosing regimen that includes a loading phase followed by a maintenance phase, wherein the loading phase comprises administering to the subject a fixed dose of about 200 mg to about 600 mg of the RNAi agent, and wherein the maintenance phase comprises administering to the subject a fixed dose of about 25 mg to about 100 mg of the RNAi agent once a month, wherein the double-stranded RNAi agent comprises a sense strand and an antisense strand forming a double stranded region, the antisense strand comprising a region of complementarity which comprises at least 15 contiguous nucleotides differing by no more than 3 nucleotides from nucleotides 3544-3623 of the nucleotide sequence of SEQ ID NO: 1, thereby treating the subject having hperlipidemia.

[0159] In one embodiment, the double-stranded ribonucleic acid (RNAi) agent for use in the methods of the present invention comprises a sense strand and an antisense strand forming a double stranded region, wherein the antisense strand comprises the nucleotide sequence 5′-ACAAAAGCAAAACAGGUCUAGAA-3′ (SEQ ID NO: 685) and the sense strand comprises the nucleotide sequence 5′-CUAGACCUGUTUUGCUUUUGU-3′ (SEQ ID NO: 686), wherein substantially all of the nucleotides of the sense strand and substantially all of the nucleotides of the antisense strand are modified nucleotides.

[0160] As used herein, a “subject” includes a human or non-human animal, preferably a vertebrate, and more preferably a mammal. A subject may include a transgenic organism. Most preferably, the subject is a human, such as a human suffering from or predisposed to developing a PCSK9-associated disease.

[0161] The methods and uses of the invention include administering a composition described herein such that expression of the target PCSK9 gene is decreased, for an extended period of time, such as, for about 80 days, 81, 82, 83, 84, 85, 86, 87, 88, 89, 90, 91, 92, 93, 94, 95, 96, 97, 98, 99, 100, 101, 102, 103, 104, 105, 106, 107, 108, 109, 110, 111, 112, 113, 114, 115, 116, 117, 118, 119, 120, 121, 122, 123, 124, 125, 126, 127, 128, 129, 130, 131, 132, 133, 134, 135, 136, 137, 138, 139, 140, 141, 142, 143, 144, 145, 146, 147, 148, 149, 150, 151, 152, 153, 154, 155, 156, 157, 158, 159, 160, 161, 162, 163, 164, 165, 166, 167, 168, 169, 170, 171, 172, 173, 174, 175, 176, 177, 178, 179, or about 180 days, or longer.

[0162] Reduction in gene expression can be assessed by any methods known in the art. For example, a reduction in the expression of PCSK9 may be determined by determining the mRNA expression level of PCSK9 using methods routine to one of ordinary skill in the art, e.g., Northern blotting, qRT-PCR, by determining the protein level of PCSK9 using methods routine to one of ordinary skill in the art, such as Western blotting, immunological techniques, and/or by determining a biological activity of PCSK9, such as the effect on one or more serum lipid parameters, such as, for example, total cholesterol levels, high density lipoprotein cholesterol (HDL) levels, non-HDL levels, very low density lipoprotein cholesterol (VLDL) levels, triglyceride levels, Lp(a) levels, and lipoprotein particle size.

[0163] Administration of the dsRNA according to the methods and uses of the invention may result in a reduction of the severity, signs, symptoms, and/or markers of such diseases or disorders in a patient with a disorder that would benefit from reduction in PCSK9 expression. By “reduction” in this context is meant a statistically significant decrease in such level. The reduction can be, for example, at least about 5%, 10%, 15%, 20%, 25%, 30%, 35%, 40%, 45%, 50%, 55%, 60%, 65%, 70%, 75%, 80%, 85%, 90%, 95%, or about 100%.

[0164] Efficacy of treatment or prevention of disease can be assessed, for example by measuring disease progression, disease remission, symptom severity, serum lipid levels (e.g., LDLc levels), quality of life, dose of a medication required to sustain a treatment effect, level of a disease marker or any other measurable parameter appropriate for a given disease being treated or targeted for prevention. It is well within the ability of one skilled in the art to monitor efficacy of treatment or prevention by measuring any one of such parameters, or any combination of parameters. For example, efficacy of treatment of a hyperlipidemia may be assessed, for example, by periodic monitoring of LDLc levels. Comparisons of the later readings with the initial readings provide a physician an indication of whether the treatment is effective. It is well within the ability of one skilled in the art to monitor efficacy of treatment or prevention by measuring any one of such parameters, or any combination of parameters.

[0165] A treatment or preventive effect is evident when there is a statistically significant improvement in one or more parameters of disease status, or by a failure to worsen or to develop symptoms where they would otherwise be anticipated. As an example, a favorable change of at least 10% in a measurable parameter of disease, and preferably at least 20%, 30%, 40%, 50% or more can be indicative of effective treatment. Efficacy for a given iRNA drug or formulation of that drug can also be judged using an experimental animal model for the given disease as known in the art. When using an experimental animal model, efficacy of treatment is evidenced when a statistically significant reduction in a marker or symptom is observed.

[0166] Alternatively, the efficacy can be measured by a reduction in the severity of disease as determined by one skilled in the art of diagnosis based on a clinically accepted disease severity grading scale. Any positive change resulting in e.g., lessening of severity of disease measured using the appropriate scale, represents adequate treatment using an iRNA or iRNA formulation as described herein.

[0167] In general, the iRNA agent does not activate the immune system, e.g., it does not increase cytokine levels, such as TNF-alpha or IFN-alpha levels. For example, when measured by an assay, such as an in vitro PBMC assay, such as described herein, the increase in levels of TNF-alpha or IFN-alpha, is less than 30%, 20%, or 10% of control cells treated with a control dsRNA, such as a dsRNA that does not target PCSK9.

[0168] In another embodiment, administration can be provided when Low Density Lipoprotein cholesterol (LDLc) levels reach or surpass a predetermined minimal level, such as greater than 70 mg/dL. 130 mg/dL, 150 mg/dL, 200 mg/dL, 300 mg/dL, or 400 mg/dL.

[0169] The effect of the decreased PCSK9 gene preferably results in a decrease in LDLc (low density lipoprotein cholesterol) levels in the blood, and more particularly in the serum, of the mammal. In some embodiments, LDLc levels are decreased by at least 10%, 15%, 20%, 25%, 30%, 40%, 50%, 60%, 70%, 80%, 90% or more, as compared to pretreatment levels.

[0170] In some embodiments of the methods of the invention, PCSK9 expression is decreased for an extended duration, e.g., at least one week, two weeks, three weeks, or four weeks or longer. For example, in certain instances, expression of the PCSK9 gene is suppressed by at least about 5%, 10%, 15%, 20%, 25%, 30%, 35%, 40%, 45%, or 50% by administration of an iRNA agent described herein. In some embodiments, the PCSK9 gene is suppressed by at least about 60%, 70%, or 80% by administration of the iRNA agent. In some embodiments, the PCSK9 gene is suppressed by at least about 85%, 90%, or 95% by administration of the double-stranded oligonucleotide.

[0171] The RNAi agents of the invention may be administered to a subject using any mode of administration known in the art, including, but not limited to subcutaneous, intravenous, intramuscular, intraocular, intrabronchial, intrapleural, intraperitoneal, intraarterial, lymphatic, cerebrospinal, and any combinations thereof. In preferred embodiments, the agents are administered subcutaneously.

[0172] In some embodiments, the administration is via a depot injection. A depot injection may release the RNAi agent in a consistent way over a prolonged time period. Thus, a depot injection may reduce the frequency of dosing needed to obtain a desired effect, e.g., a desired inhibition of PCSK9, or a therapeutic or prophylactic effect. A depot injection may also provide more consistent serum concentrations. Depot injections may include subcutaneous injections or intramuscular injections. In preferred embodiments, the depot injection is a subcutaneous injection.

[0173] In some embodiments, the administration is via a pump. The pump may be an external pump or a surgically implanted pump. In certain embodiments, the pump is a subcutaneously implanted osmotic pump. In other embodiments, the pump is an infusion pump. An infusion pump may be used for intravenous, subcutaneous, arterial, or epidural infusions. In preferred embodiments, the infusion pump is a subcutaneous infusion pump. In other embodiments, the pump is a surgically implanted pump that delivers the RNAi agent to the liver.

[0174] Other modes of administration include epidural, intracerebral, intracerebroventricular, nasal administration, intraarterial, intracardiac, intraosseous infusion, intrathecal, and intravitreal, and pulmonary. The mode of administration may be chosen based upon whether local or systemic treatment is desired and based upon the area to be treated. The route and site of administration may be chosen to enhance targeting.

[0175] The iRNA can be administered by intravenous infusion over a period of time, such as over a 5, 6, 7, 8, 9, 10, 11, 12, 13, 14, 15, 16, 17, 18, 19, 20, 21, 22, 23, 24, or about a 25 minute period. The administration may be repeated, for example, on a regular basis, such as weekly, biweekly (i.e., every two weeks) for one month, two months, three months, four months or longer. After an initial treatment regimen, the treatments can be administered on a less frequent basis. For example, after administration weekly or biweekly for three months, administration can be repeated once per month, for six months or a year or longer.

[0176] Administration of the iRNA can reduce PCSK9 levels, e.g., in a cell, tissue, blood, urine or other compartment of the patient by at least about 5%, 6%, 7%, 8%, 9%, 10%, 11%, 12%, 13%, 14%, 15%, 16%, 17%, 18%, 19%, 20%, 21%, 22%, 23%, 24%, 25%, 26%, 27%, 28%, 29%, 30%, 31%, 32%, 33%, 34%, 35%, 36%, 37%, 38%, 39%, 40%, 41%, 42%, 43%, 44%, 45%, 46%, 47%, 48%, 49%, 50%, 51%, 52%, 53%, 54%, 55%, 56%, 57%, 58%, 59%, 60%, 61%, 62%, 63%, 64%, 65%, 66%, 67%, 68%, 69%, 70%, 71%, 72%, 73%, 74%, 75%, 76%, 77%, 78%, 79%, 80%, 81%, 82%, 83%, 84%, 85%, 86%, 87%, 88%, 89%, 90%, 91%, 92%, 93%, 94%, 95%, 96%, 97%, 98%, or at least about 99% or more.

[0177] Before administration of a full dose of the iRNA, patients can be administered a smaller dose, such as a 5% infusion, and monitored for adverse effects, such as an allergic reaction. In another example, the patient can be monitored for unwanted immunostimulatory effects, such as increased cytokine (e.g., TNF-alpha or INF-alpha) levels.

[0178] Owing to the inhibitory effects on PCSK9 expression, a composition according to the invention or a pharmaceutical composition prepared therefrom can enhance the quality of life. An iRNA of the invention may be administered in “naked” form, or as a “free iRNA.” A naked iRNA is administered in the absence of a pharmaceutical composition. The naked iRNA may be in a suitable buffer solution. The buffer solution may comprise acetate, citrate, prolamine, carbonate, or phosphate, or any combination thereof. In one embodiment, the buffer solution is phosphate buffered saline (PBS). The pH and osmolarity of the buffer solution containing the iRNA can be adjusted such that it is suitable for administering to a subject.

[0179] Alternatively, an iRNA of the invention may be administered as a pharmaceutical composition, such as a dsRNA liposomal formulation.

[0180] The invention further provides methods and uses for the use of an iRNA or a pharmaceutical composition thereof, e.g., for treating a subject that would benefit from reduction and/or inhibition of PCSK9 expression, e.g., a subject having hyperlipidemia, e.g., hypercholesterolemia, in combination with other pharmaceuticals and/or other therapeutic methods, e.g., with known pharmaceuticals and/or known therapeutic methods, such as, for example, those which are currently employed for treating these disorders. The siRNA and an additional therapeutic agent can be administered in combination in the same composition, e.g., parenterally, or the additional therapeutic agent can be administered as part of a separate composition or by another method described herein.

[0181] Examples of additional therapeutic agents include those known to treat an agent known to treat a lipid disorders, such as hypercholesterolemia, atherosclerosis or dyslipidemia. For example, a siRNA featured in the invention can be administered with, e.g., an HMG-COA reductase inhibitor (e.g., a statin), a fibrate, a bile acid sequestrant, niacin, an antiplatelet agent, an angiotensin converting enzyme inhibitor, an angiotensin II receptor antagonist (e.g., losartan potassium, such as Merck & Co.'s Cozaar®), an acylCoA cholesterol acetyltransferase (ACAT) inhibitor, a cholesterol absorption inhibitor, a cholesterol ester transfer protein (CETP) inhibitor, a microsomal triglyceride transfer protein (MTTP) inhibitor, a cholesterol modulator, a bile acid modulator, a peroxisome proliferation activated receptor (PPAR) agonist, a gene-based therapy, a composite vascular protectant (e.g., AGI-1067, from Atherogenics), a glycoprotein IIb/IIIa inhibitor, aspirin or an aspirin-like compound, an IBAT inhibitor (e.g., S-8921, from Shionogi), a squalene synthase inhibitor, or a monocyte chemoattractant protein (MCP)-I inhibitor. Exemplary HMG-COA reductase inhibitors include atorvastatin (Pfizer's Lipitor®/Tahor/Sortis/Torvast/Cardyl), pravastatin (Bristol-Myers Squibb's Pravachol, Sankyo's Mevalotin/Sanaprav), simvastatin (Merck's Zocor®/Sinvacor, Boehringer Ingelheim's Denan, Banyu's Lipovas), lovastatin (Merck's Mevacor/Mevinacor, Bexal's Lovastatina, Cepa; Schwarz Pharma's Liposcler), fluvastatin (Novartis' Lescol®/Locol/Lochol, Fujisawa's Cranoc, Solvay's Digaril), cerivastatin (Bayer's Lipobay/GlaxoSmithKline's Baycol), rosuvastatin (AstraZeneca's Crestor®), and pitivastatin (itavastatin/risivastatin) (Nissan Chemical, Kowa Kogyo, Sankyo, and Novartis). Exemplary fibrates include, e.g., bezafibrate (e.g., Roche's Befizal®/Cedur®/Bezalip®, Kissei's Bezatol), clofibrate (e.g., Wyeth's Atromid-S®), fenofibrate (e.g., Fournier's Lipidil/Lipantil, Abbott's Tricor®, Takeda's Lipantil, generics), gemfibrozil (e.g., Pfizer's Lopid/Lipur) and ciprofibrate (Sanofi-Synthelabo's Modalim®). Exemplary bile acid sequestrants include, e.g., cholestyramine (Bristol-Myers Squibb's Questran® and Questran Light™), colestipol (e.g., Pharmacia's Colestid), and colesevelam (Genzyme/Sankyo's WelChol™). Exemplary niacin therapies include, e.g., immediate release formulations, such as Aventis' Nicobid, Upsher-Smith's Niacor, Aventis' Nicolar, and Sanwakagaku's Perycit. Niacin extended release formulations include, e.g., Kos Pharmaceuticals' Niaspan and Upsher-Smith's SIo-Niacin. Exemplary antiplatelet agents include, e.g., aspirin (e.g., Bayer's aspirin), clopidogrel (Sanofi-Synthelabo/Bristol-Myers Squibb's Plavix), and ticlopidine (e.g., Sanofi-Synthelabo's Ticlid and Daiichi's Panaldine). Other aspirin-like compounds useful in combination with a dsRNA targeting PCSK9 include, e.g., Asacard (slow-release aspirin, by Pharmacia) and Pamicogrel (Kanebo/Angelini Ricerche/CEPA). Exemplary angiotensin-converting enzyme inhibitors include, e.g., ramipril (e.g., Aventis' Altace) and enalapril (e.g., Merck & Co.'s Vasotec). Exemplary acyl CoA cholesterol acetyltransferase (AC AT) inhibitors include, e.g., avasimibe (Pfizer), eflucimibe (BioMsrieux Pierre Fabre/Eli Lilly), CS-505 (Sankyo and Kyoto), and SMP-797 (Sumito). Exemplary cholesterol absorption inhibitors include, e.g., ezetimibe (Merck/Schering-Plough Pharmaceuticals Zetia®) and Pamaqueside (Pfizer). Exemplary CETP inhibitors include, e.g., Torcetrapib (also called CP-529414, Pfizer), JTT-705 (Japan Tobacco), and CETi-I (Avant Immunotherapeutics). Exemplary microsomal triglyceride transfer protein (MTTP) inhibitors include, e.g., implitapide (Bayer), R-103757 (Janssen), and CP-346086 (Pfizer). Other exemplary cholesterol modulators include, e.g., NO-1886 (Otsuka/TAP Pharmaceutical), CI-1027 (Pfizer), and WAY-135433 (Wyeth-Ayerst).

[0182] Exemplary bile acid modulators include, e.g., HBS-107 (Hisamitsu/Banyu), Btg-511 (British Technology Group), BARI-1453 (Aventis), S-8921 (Shionogi), SD-5613 (Pfizer), and AZD-7806 (AstraZeneca). Exemplary peroxisome proliferation activated receptor (PPAR) agonists include, e.g., tesaglitazar (AZ-242) (AstraZeneca), Netoglitazone (MCC-555) (Mitsubishi/Johnson & Johnson), GW-409544 (Ligand Pharmaceuticals/GlaxoSmithKline), GW-501516 (Ligand Pharmaceuticals/GlaxoSmithKline), LY-929 (Ligand Pharmaceuticals and Eli Lilly), LY-465608 (Ligand Pharmaceuticals and Eli Lilly), LY-518674 (Ligand Pharmaceuticals and Eli Lilly), and MK-767 (Merck and Kyorin). Exemplary gene-based therapies include, e.g., AdGWEGF 121.10 (Gen Vec), ApoA1 (UCB Pharma/Groupe Fournier), EG-004 (Trinam) (Ark Therapeutics), and ATP-binding cassette transporter-A1 (ABCA1) (CV Therapeutics/Incyte, Aventis, Xenon). Exemplary Glycoprotein IIb/IIIa inhibitors include, e.g., roxifiban (also called DMP754, Bristol-Myers Squibb), Gantofiban (Merck KGaA/Yamanouchi), and Cromafiban (Millennium Pharmaceuticals). Exemplary squalene synthase inhibitors include, e.g., BMS-1884941 (Bristol-Myers Squibb), CP-210172 (Pfizer), CP-295697 (Pfizer), CP-294838 (Pfizer), and TAK-475 (Takeda). An exemplary MCP-I inhibitor is, e.g., RS-504393 (Roche Bioscience). The anti-atherosclerotic agent BO-653 (Chugai Pharmaceuticals), and the nicotinic acid derivative Nyclin (Yamanouchi Pharmacuticals) are also appropriate for administering in combination with a dsRNA featured in the invention. Exemplary combination therapies suitable for administration with a dsRNA targeting PCSK9 include, e.g., advicor (Niacin/lovastatin from Kos Pharmaceuticals), amlodipine/atorvastatin (Pfizer), and ezetimibe/simvastatin (e.g., Vytorin® 10/10, 10/20, 10/40, and 10/80 tablets by Merck/Schering-Plough Pharmaceuticals). Agents for treating hypercholesterolemia, and suitable for administration in combination with a dsRNA targeting PCSK9 include, e.g., lovastatin, niacin Altoprev® Extended-Release Tablets (Andrx Labs), lovastatin Caduet® Tablets (Pfizer), amlodipine besylate, atorvastatin calcium Crestor® Tablets (AstraZeneca), rosuvastatin calcium Lescol® Capsules (Novartis), fluvastatin sodium Lescol® (Reliant, Novartis), fluvastatin sodium Lipitor® Tablets (Parke-Davis), atorvastatin calcium Lofibra® Capsules (Gate), Niaspan Extended-Release Tablets (Kos), niacin Pravachol Tablets (Bristol-Myers Squibb), pravastatin sodium TriCor® Tablets (Abbott), fenofibrate Vytorin® 10/10 Tablets (Merck/Schering-Plough Pharmaceuticals), ezetimibe, simvastatin WelChol™ Tablets (Sankyo), colesevelam hydrochloride Zetia® Tablets (Schering), czetimibe Zetia® Tablets (Merck/Schering-Plough Pharmaceuticals), and ezetimibe Zocor® Tablets (Merck).

[0183] In one embodiment, an iRNA agent is administered in combination with an ezetimibe/simvastatin combination (e.g., Vytorin® (Merck/Schering-Plough Pharmaceuticals)).

[0184] In another embodiment, an iRNA agent is administered in combination with an anti-PCSK9 antibody. Exemplary anti-PCSK9 antibodies for use in the combination therapies of the invention include, for example, alirocumab (Praluent), evolocumab (Repatha), bococizumab (PF-04950615, RN316, RN-316, L1L3; Pfizer, Rinat), lodelcizumab (LFU720, pJG04; Novartis), ralpancizumab (RN317, PF-05335810; Pfizer, Rinat), RG7652 (MPSK3169A, YW508.20.33b; Genentech), LY3015014 (Lilly), LPD1462 (h1F11; Schering-Plough), AX1(AX189, 1B20, 1D05; Merck & Co), ALD306 (Alder); mAb1 (Bochringer), andIg1-PA4 (Nanjing Normal U.).

[0185] In one embodiment, the iRNA agent is administered to the patient, and then the additional therapeutic agent is administered to the patient (or vice versa). In another embodiment, the iRNA agent and the additional therapeutic agent are administered at the same time.

[0186] In another aspect, the invention features, a method of instructing an end user, e.g., a caregiver or a subject, on how to administer an iRNA agent described herein. The method includes, optionally, providing the end user with one or more doses of the iRNA agent, and instructing the end user to administer the iRNA agent on a regimen described herein, thereby instructing the end user.

[0187] In one aspect, the invention provides a method of treating a patient by selecting a patient on the basis that the patient is in need of LDL lowering, LDL lowering without lowering of HDL, ApoB lowering, or total cholesterol lowering. The method includes administering to the patient a siRNA in an amount sufficient to lower the patient's LDL levels or ApoB levels, e.g., without substantially lowering HDL levels.

[0188] Genetic predisposition plays a role in the development of target gene associated diseases, e.g., hyperlipidemia. Therefore, a patient in need of a siRNA can be identified by taking a family history, or, for example, screening for one or more genetic markers or variants. Examples of genes involved in hyperlipidemia include but are not limited to, e.g., LDL receptor (LDLR), the apoliproteins (ApoAl, ApoB, ApoE, and the like), Cholesteryl ester transfer protein (CETP), Lipoprotein lipase (LPL), hepatic lipase (LIPC), Endothelial lipase (EL), Lecithinxholesteryl acyltransferase (LCAT).

[0189] A healthcare provider, such as a doctor, nurse, or family member, can take a family history before prescribing or administering an iRNA agent of the invention. In addition, a test may be performed to determine a gencotype or phenotype. For example, a DNA test may be performed on a sample from the patient, e.g., a blood sample, to identify the PCSK9 genotype and/or phenotype before a PCSK9 dsRNA is administered to the patient. In another embodiment, a test is performed to identify a related genotype and/or phenotype, e.g., a LDLR genotype. Example of genetic variants with the LDLR gene can be found in the art, e.g., in the following publications which are incorporated by reference: Costanza et al (2005) Am J Epidemiol. 15; 161(8):714-24; Yamada et al. (2008) J Med Genet. January; 45(1):22-8, Epub 2007 Aug. 31; and Boes et al (2009) Exp. Gerontol 44: 136-160, Epub 2008 Nov. 17.

[0190] The present invention further provides methods of inhibiting expression of a Proprotein Convertase Subtilisin Kexin 9 (PCSK9) in a cell, such as a cell within a subject, e.g., a human subject.

[0191] Accordingly, the present invention provides methods of inhibiting expression of a PCSK9 gene in a cell. The methods include contacting a cell with an RNAi agent, e.g., a double stranded RNAi agent, in an amount effective to inhibit expression of the PCSK9 gene in the cell, thereby inhibiting expression of the PCSK9 in the cell.

[0192] Contacting of a cell with a double stranded RNAi agent may be done in vitro or in vivo. Contacting a cell in vivo with the RNAi agent includes contacting a cell or group of cells within a subject, e.g., a human subject, with the RNAi agent. Combinations of in vitro and in vivo methods of contacting are also possible. Contacting may be direct or indirect, as discussed above. Furthermore, contacting a cell may be accomplished via a targeting ligand, including any ligand described herein or known in the art. In preferred embodiments, the targeting ligand is a carbohydrate moiety, e.g., a GalNAc₃ ligand, or any other ligand that directs the RNAi agent to a site of interest, e.g., the liver of a subject.

[0193] The term “inhibiting.” as used herein, is used interchangeably with “reducing.” “silencing.” “downregulating” and other similar terms, and includes any level of inhibition.

[0194] The phrase “inhibiting expression of a PCSK9” is intended to refer to inhibition of expression of any PCSK9 gene (such as, e.g., a mouse PCSK9 gene, a rat PCSK9 gene, a monkey PCSK9 gene, or a human PCSK9 gene) as well as variants or mutants of a PCSK9 gene. Thus, the PCSK9 gene may be a wild-type PCSK9 gene, a mutant PCSK9 gene, or a transgenic PCSK9 gene in the context of a genetically manipulated cell, group of cells, or organism.

[0195] “Inhibiting expression of a PCSK9 gene” includes any level of inhibition of a PCSK9 gene, e.g., at least partial suppression of the expression of a PCSK9 gene. The expression of the PCSK9 gene may be assessed based on the level, or the change in the level, of any variable associated with PCSK9 gene expression, e.g., PCSK9 mRNA level, PCSK9 protein level, or lipid levels. This level may be assessed in an individual cell or in a group of cells, including, for example, a sample derived from a subject.

[0196] Inhibition may be assessed by a decrease in an absolute or relative level of one or more variables that are associated with PCSK9 expression compared with a control level. The control level may be any type of control level that is utilized in the art, e.g., a pre-dose baseline level, or a level determined from a similar subject, cell, or sample that is untreated or treated with a control (such as, e.g., buffer only control or inactive agent control).

[0197] In some embodiments of the methods of the invention, expression of a PCSK9 gene is inhibited by at least about 5%, at least about 10%, at least about 15%, at least about 20%, at least about 25%, at least about 30%, at least about 35%, at least about 40%, at least about 45%, at least about 50%, at least about 55%, at least about 60%, at least about 65%, at least about 70%, at least about 75%, at least about 80%, at least about 85%, at least about 90%, at least about 91%, at least about 92%, at least about 93%, at least about 94%, at least about 95%, at least about 96%, at least about 97%, at least about 98%, or at least about 99%.

[0198] Inhibition of the expression of a PCSK9 gene may be manifested by a reduction of the amount of mRNA expressed by a first cell or group of cells (such cells may be present, for example, in a sample derived from a subject) in which a PCSK9 gene is transcribed and which has or have been treated (e.g., by contacting the cell or cells with an RNAi agent of the invention, or by administering an RNAi agent of the invention to a subject in which the cells are or were present) such that the expression of a PCSK9 gene is inhibited, as compared to a second cell or group of cells substantially identical to the first cell or group of cells but which has not or have not been so treated (control cell(s)). In preferred embodiments, the inhibition is assessed by expressing the level of mRNA in treated cells as a percentage of the level of mRNA in control cells, using the following formula:

$$\frac{( mRNA in control cells ) - ( mRNA in treated cells )}{( mRNA in control cells )} \cdot 100 \%$$

[0199] Alternatively, inhibition of the expression of a PCSK9 gene may be assessed in terms of a reduction of a parameter that is functionally linked to PCSK9 gene expression, e.g., PCSK9 protein expression, such as lipid levels, cholesterol levels, e.g., LDLc levels. PCSK9 gene silencing may be determined in any cell expressing PCSK9, either constitutively or by genomic engineering, and by any assay known in the art. The liver is the major site of PCSK9 expression. Other significant sites of expression include the pancreas, kidney, and intestines.

[0200] Inhibition of the expression of a PCSK9 protein may be manifested by a reduction in the level of the PCSK9 protein that is expressed by a cell or group of cells (e.g., the level of protein expressed in a sample derived from a subject). As explained above for the assessment of mRNA suppression, the inhibition of protein expression levels in a treated cell or group of cells may similarly be expressed as a percentage of the level of protein in a control cell or group of cells.

[0201] A control cell or group of cells that may be used to assess the inhibition of the expression of a PCSK9 gene includes a cell or group of cells that has not yet been contacted with an RNAi agent of the invention. For example, the control cell or group of cells may be derived from an individual subject (e.g., a human or animal subject) prior to treatment of the subject with an RNAi agent.

[0202] The level of PCSK9 mRNA that is expressed by a cell or group of cells may be determined using any method known in the art for assessing mRNA expression. In one embodiment, the level of expression of PCSK9 in a sample is determined by detecting a transcribed polynucleotide, or portion thereof, e.g., mRNA of the PCSK9 gene. RNA may be extracted from cells using RNA extraction techniques including, for example, using acid phenol/guanidine isothiocyanate extraction (RNAzol B; Biogenesis), RNeasy RNA preparation kits (Qiagen) or PAXgene (PreAnalytix, Switzerland). Typical assay formats utilizing ribonucleic acid hybridization include nuclear run-on assays, RT-PCR, RNase protection assays (Melton et al., Nuc. Acids Res. 12:7035), Northern blotting, in situ hybridization, and microarray analysis.

[0203] In one embodiment, the level of expression of PCSK9 is determined using a nucleic acid probe. The term “probe”, as used herein, refers to any molecule that is capable of selectively binding to a specific PCSK9. Probes can be synthesized by one of skill in the art, or derived from appropriate biological preparations. Probes may be specifically designed to be labeled. Examples of molecules that can be utilized as probes include, but are not limited to, RNA, DNA, proteins, antibodies, and organic molecules.

[0204] Isolated mRNA can be used in hybridization or amplification assays that include, but are not limited to, Southern or Northern analyses, polymerase chain reaction (PCR) analyses and probe arrays. One method for the determination of mRNA levels involves contacting the isolated mRNA with a nucleic acid molecule (probe) that can hybridize to PCSK9 mRNA. In one embodiment, the mRNA is immobilized on a solid surface and contacted with a probe, for example by running the isolated mRNA on an agarose gel and transferring the mRNA from the gel to a membrane, such as nitrocellulose. In an alternative embodiment, the probe(s) are immobilized on a solid surface and the mRNA is contacted with the probe(s), for example, in an Affymetrix gene chip array. A skilled artisan can readily adapt known mRNA detection methods for use in determining the level of PCSK9 mRNA.

[0205] An alternative method for determining the level of expression of PCSK9 in a sample involves the process of nucleic acid amplification and/or reverse transcriptase (to prepare cDNA) of for example mRNA in the sample, e.g., by RT-PCR (the experimental embodiment set forth in Mullis, 1987, U.S. Pat. No. 4,683,202), ligase chain reaction (Barany (1991) Proc. Natl. Acad. Sci. USA 88:189-193), self sustained sequence replication (Guatelli et al. (1990) Proc. Natl. Acad. Sci. USA 87:1874-1878), transcriptional amplification system (Kwoh et al. (1989) Proc. Natl. Acad. Sci. USA 86:1173-1177), Q-Beta Replicase (Lizardi et al. (1988) Bio/Technology 6:1197), rolling circle replication (Lizardi et al., U.S. Pat. No. 5,854,033) or any other nucleic acid amplification method, followed by the detection of the amplified molecules using techniques well known to those of skill in the art. These detection schemes are especially useful for the detection of nucleic acid molecules if such molecules are present in very low numbers. In particular aspects of the invention, the level of expression of PCSK9 is determined by quantitative fluorogenic RT-PCR (i.e., the TaqMan™ System).

[0206] The expression levels of PCSK9 mRNA may be monitored using a membrane blot (such as used in hybridization analysis such as Northern, Southern, dot, and the like), or microwells, sample tubes, gels, beads or fibers (or any solid support comprising bound nucleic acids). See U.S. Pat. Nos. 5,770,722, 5,874,219, 5,744,305, 5,677,195 and 5,445,934, which are incorporated herein by reference. The determination of PCSK9 expression level may also comprise using nucleic acid probes in solution.

[0207] In preferred embodiments, the level of mRNA expression is assessed using branched DNA (bDNA) assays or real time PCR (qPCR). The use of these methods is described and exemplified in the Examples presented herein.

[0208] The level of PCSK9 protein expression may be determined using any method known in the art for the measurement of protein levels. Such methods include, for example, electrophoresis, capillary electrophoresis, high performance liquid chromatography (HPLC), thin layer chromatography (TLC), hyperdiffusion chromatography, fluid or gel precipitin reactions, absorption spectroscopy, a colorimetric assays, spectrophotometric assays, flow cytometry, immunodiffusion (single or double), immunoelectrophoresis, Western blotting, radioimmunoassay (RIA), enzyme-linked immunosorbent assays (ELISAs), immunofluorescent assays, electrochemiluminescence assays, and the like.

[0209] The term “sample” as used herein refers to a collection of similar fluids, cells, or tissues isolated from a subject, as well as fluids, cells, or tissues present within a subject. Examples of biological fluids include blood, serum and serosal fluids, plasma, lymph, urine, cerebrospinal fluid, saliva, ocular fluids, and the like. Tissue samples may include samples from tissues, organs or localized regions. For example, samples may be derived from particular organs, parts of organs, or fluids or cells within those organs. In certain embodiments, samples may be derived from the liver (e.g., whole liver or certain segments of liver or certain types of cells in the liver, such as, e.g., hepatocytes). In preferred embodiments, a “sample derived from a subject” refers to blood or plasma drawn from the subject. In further embodiments, a “sample derived from a subject” refers to liver tissue derived from the subject.

[0210] In some embodiments of the methods of the invention, the RNAi agent is administered to a subject such that the RNAi agent is delivered to a specific site within the subject. The inhibition of expression of PCSK9 may be assessed using measurements of the level or change in the level of PCSK9 mRNA or PCSK9 protein in a sample derived from fluid or tissue from the specific site within the subject. In preferred embodiments, the site is the liver. The site may also be a subsection or subgroup of cells from any one of the aforementioned sites. The site may also include cells that express a particular type of receptor.

### III. IRNAS FOR USE IN THE METHODS OF THE INVENTION

[0211] Described herein are methods for the use of double-stranded RNAi agents which inhibit the expression of a PCSK9 gene in a cell, such as a cell within a subject, e.g., a mammal, such as a human having a PCSK9-associated disorder, e.g., a hyperlipidemia, e.g., hypercholesterolemia.

[0212] Accordingly, the invention provides double-stranded RNAi agents capable of inhibiting the expression of a target gene (i.e., a PCSK9 gene) in vivo for use in the claimed methods.

[0213] In one embodiment, the RNA of the iRNA of the invention e.g., a dsRNA, is un-modified, and does not comprise, e.g., chemical modifications and/or conjugations known in the art and described herein. In another embodiment, the RNA of an iRNA of the invention, e.g., a dsRNA, is chemically modified to enhance stability or other beneficial characteristics. In certain aspects of the invention, substantially all of the nucleotides of an iRNA of the invention are modified. For example substantially all of the nucleotides of the sense strand are modified nucleotides, and/or substantially all of the nucleotides of the antisense strand are modified nucleotides and/or substantially all of the nucleotides of both the sense strand and the antisense strand are modified nucleotides. In other embodiments of the invention, all of the nucleotides of an iRNA of the invention are modified. For example all of the nucleotides of the sense strand are modified nucleotides, and/or all of the nucleotides of the antisense strand are modified nucleotides and/or all of the nucleotides of both the sense strand and the antisense strand are modified nucleotides. iIRNAs of the invention in which “substantially all of the nucleotides are modified” are largely but not wholly modified and can include not more than 5, 4, 3, 2, or 1 unmodified nucleotides.

[0214] The dsRNA includes an antisense strand having a region of complementarity which is complementary to at least a part of an mRNA formed in the expression of a PCSK9 gene. The region of complementarity is about 30 nucleotides or less in length (e.g., about 30, 29, 28, 27, 26, 25, 24, 23, 22, 21, 20, 19, or 18 nucleotides or less in length). Upon contact with a cell expressing the PCSK9 gene, the iRNA inhibits the expression of the PCSK9 gene (e.g., a humanPCSK9 gene) by at least about 10% as assayed by, for example, a PCR or branched DNA (bDNA)-based method, or by a protein-based method, such as by immunofluorescence analysis, using, for example, Western Blotting or flowcytometric techniques.

[0215] A dsRNA includes two RNA strands that are complementary and hybridize to form a duplex structure under conditions in which the dsRNA will be used. One strand of a dsRNA (the antisense strand) includes a region of complementarity that is substantially complementary, and generally fully complementary, to a target sequence. The target sequence can be derived from the sequence of an mRNA formed during the expression of a PCSK9 gene. The other strand (the sense strand) includes a region that is complementary to the antisense strand, such that the two strands hybridize and form a duplex structure when combined under suitable conditions. As described elsewhere herein and as known in the art, the complementary sequences of a dsRNA can also be contained as self-complementary regions of a single nucleic acid molecule, as opposed to being on separate oligonucleotides.

[0216] Generally, the duplex structure is between 15 and 30 base pairs in length, e.g., between, 15-29, 15-28, 15-27, 15-26, 15-25, 15-24, 15-23, 15-22, 15-21, 15-20, 15-19, 15-18, 15-17, 18-30, 18-29, 18-28, 18-27, 18-26, 18-25, 18-24, 18-23, 18-22, 18-21, 18-20, 19-30, 19-29, 19-28, 19-27, 19-26, 19-25, 19-24, 19-23, 19-22, 19-21, 19-20, 20-30, 20-29, 20-28, 20-27, 20-26, 20-25, 20-24, 20-23, 20-22, 20-21, 21-30, 21-29, 21-28, 21-27, 21-26, 21-25, 21-24, 21-23, or 21-22 base pairs in length. Ranges and lengths intermediate to the above recited ranges and lengths are also contemplated to be part of the invention.

[0217] Similarly, the region of complementarity to the target sequence is between 15 and 30 nucleotides in length, e.g., between 15-29, 15-28, 15-27, 15-26, 15-25, 15-24, 15-23, 15-22, 15-21, 15-20, 15-19, 15-18, 15-17, 18-30, 18-29, 18-28, 18-27, 18-26, 18-25, 18-24, 18-23, 18-22, 18-21, 18-20, 19-30, 19-29, 19-28, 19-27, 19-26, 19-25, 19-24, 19-23, 19-22, 19-21, 19-20, 20-30, 20-29, 20-28, 20-27, 20-26, 20-25, 20-24, 20-23, 20-22, 20-21, 21-30, 21-29, 21-28, 21-27, 21-26, 21-25, 21-24, 21-23, or 21-22 nucleotides in length. Ranges and lengths intermediate to the above recited ranges and lengths are also contemplated to be part of the invention.

[0218] In some embodiments, the dsRNA is about 15 to about 20 nucleotides in length, or between about 25 and about 30 nucleotides in length. In general, the dsRNA is long enough to serve as a substrate for the Dicer enzyme. For example, it is well-known in the art that dsRNAs longer than about 21-23 nucleotides in length may serve as substrates for Dicer. As the ordinarily skilled person will also recognize, the region of an RNA targeted for cleavage will most often be part of a larger RNA molecule, often an mRNA molecule. Where relevant, a “part” of an mRNA target is a contiguous sequence of an mRNA target of sufficient length to allow it to be a substrate for RNAi-directed cleavage (i.e., cleavage through a RISC pathway).

[0219] In certain embodiments, a dsRNA agent of the invention may include an RNA strand (the antisense strand) which can include longer lengths, for example up to 66 nucleotides, e.g., 36-66, 26-36, 25-36, 31-60, 22-43, 27-53 nucleotides in length with a region of at least 19 contiguous nucleotides that is substantially complementary to at least a part of an mRNA transcript of a PCSK9 gene. These dsRNA agents with the longer length antisense strands preferably include a second RNA strand (the sense strand) of 20-60 nucleotides in length wherein the sense and antisense strands form a duplex of 18-30 contiguous nucleotides.

[0220] One of skill in the art will also recognize that the duplex region is a primary functional portion of a dsRNA, e.g., a duplex region of about 9 to 36 base pairs, e.g., about 10-36, 11-36, 12-36, 13-36, 14-36, 15-36, 9-35, 10-35, 11-35, 12-35, 13-35, 14-35, 15-35, 9-34, 10-34, 11-34, 12-34, 13-34, 14-34, 15-34, 9-33, 10-33, 11-33, 12-33, 13-33, 14-33, 15-33, 9-32, 10-32, 11-32, 12-32, 13-32, 14-32, 15-32, 9-31, 10-31, 11-31, 12-31, 13-32, 14-31, 15-31, 15-30, 15-29, 15-28, 15-27, 15-26, 15-25, 15-24, 15-23, 15-22, 15-21, 15-20, 15-19, 15-18, 15-17, 18-30, 18-29, 18-28, 18-27, 18-26, 18-25, 18-24, 18-23, 18-22, 18-21, 18-20, 19-30, 19-29, 19-28, 19-27, 19-26, 19-25, 19-24, 19-23, 19-22, 19-21, 19-20, 20-30, 20-29, 20-28, 20-27, 20-26, 20-25, 20-24, 20-23, 20-22, 20-21, 21-30, 21-29, 21-28, 21-27, 21-26, 21-25, 21-24, 21-23, or 21-22 base pairs.

[0221] Thus, in one embodiment, to the extent that it becomes processed to a functional duplex, of e.g., 15-30 base pairs, that targets a desired RNA for cleavage, an RNA molecule or complex of RNA molecules having a duplex region greater than 30 base pairs is a dsRNA. Thus, an ordinarily skilled artisan will recognize that in one embodiment, a miRNA is a dsRNA. In another embodiment, a dsRNA is not a naturally occurring miRNA. In another embodiment, an iRNA agent useful to target PCSK9 expression is not generated in the target cell by cleavage of a larger dsRNA.

[0222] A dsRNA as described herein can further include one or more single-stranded nucleotide overhangs e.g., 1, 2, 3, or 4 nucleotides. dsRNAs having at least one nucleotide overhang can have unexpectedly superior inhibitory properties relative to their blunt-ended counterparts. A nucleotide overhang can comprise or consist of a nucleotide/nucleoside analog, including a deoxynucleotide/nucleoside. The overhang(s) can be on the sense strand, the antisense strand or any combination thereof. Furthermore, the nucleotide(s) of an overhang can be present on the 5′-end, 3′-end or both ends of either an antisense or sense strand of a dsRNA. In certain embodiments, longer, extended overhangs are possible.

[0223] A dsRNA can be synthesized by standard methods known in the art as further discussed below, e.g., by use of an automated DNA synthesizer, such as are commercially available from, for example, Bioscarch, Applied Biosystems, Inc.

[0224] iRNA compounds of the invention may be prepared using a two-step procedure. First, the individual strands of the double-stranded RNA molecule are prepared separately. Then, the component strands are annealed. The individual strands of the siRNA compound can be prepared using solution-phase or solid-phase organic synthesis or both. Organic synthesis offers the advantage that the oligonucleotide strands comprising unnatural or modified nucleotides can be easily prepared. Single-stranded oligonucleotides of the invention can be prepared using solution-phase or solid-phase organic synthesis or both.

[0225] In one aspect, a dsRNA of the invention includes at least two nucleotide sequences, a sense sequence and an anti-sense sequence. The sense strand is selected from the group of sequences provided in Table 1, and the corresponding antisense strand of the sense strand is selected from the group of sequences of Table 1. In this aspect, one of the two sequences is complementary to the other of the two sequences, with one of the sequences being substantially complementary to a sequence of an mRNA generated in the expression of a PCSK9 gene. As such, in this aspect, a dsRNA will include two oligonucleotides, where one oligonucleotide is described as the sense strand in Table 1, and the second oligonucleotide is described as the corresponding antisense strand of the sense strand in Table 1. In one embodiment, the substantially complementary sequences of the dsRNA are contained on separate oligonucleotides. In another embodiment, the substantially complementary sequences of the dsRNA are contained on a single oligonucleotide.

[0226] It will be understood that, although some of the sequences in Table 1 are described as modified and/or conjugated sequences, the RNA of the iRNA of the invention e.g., a dsRNA of the invention, may comprise any one of the sequences set forth in Table 1 that is un-modified, un-conjugated, and/or modified and/or conjugated differently than described therein.

[0227] The skilled person is well aware that dsRNAs having a duplex structure of between about 20 and 23 base pairs, e.g., 21, base pairs have been hailed as particularly effective in inducing RNA interference (Elbashir et al., EMBO 2001, 20:6877-6888). However, others have found that shorter or longer RNA duplex structures can also be effective (Chu and Rana (2007) RNA 14:1714-1719; Kim et al. (2005) Nat Biotech 23:222-226). In the embodiments described above, by virtue of the nature of the oligonucleotide sequences provided in Table 1, dsRNAs described herein can include at least one strand of a length of minimally 21 nucleotides. It can be reasonably expected that shorter duplexes having one of the sequences of any one of Table 1 minus only a few nucleotides on one or both ends can be similarly effective as compared to the dsRNAs described above. Hence, dsRNAs having a sequence of at least 15, 16, 17, 18, 19, 20, or more contiguous nucleotides derived from one of the sequences of any one of Tables 3, 4, 5, 6, 18, 19, 20, 21, and 23, and differing in their ability to inhibit the expression of a PCSK9 gene by not more than about 5, 10, 15, 20, 25, or 30% inhibition from a dsRNA comprising the full sequence, are contemplated to be within the scope of the present invention.

[0228] In addition, the RNAs provided in Table 1 identify a site(s) in a PCSK9 transcript that is susceptible to RISC-mediated cleavage. As such, the present invention further features iRNAs that target within one of these sites. As used herein, an iRNA is said to target within a particular site of an RNA transcript if the iRNA promotes cleavage of the transcript anywhere within that particular site. Such an iRNA will generally include at least about 15 contiguous nucleotides from one of the sequences provided in Table 1 coupled to additional nucleotide sequences taken from the region contiguous to the selected sequence in a PCSK9 gene.

[0229] While a target sequence is generally about 15-30 nucleotides in length, there is wide variation in the suitability of particular sequences in this range for directing cleavage of any given target RNA. Various software packages and the guidelines set out herein provide guidance for the identification of optimal target sequences for any given gene target, but an empirical approach can also be taken in which a “window” or “mask” of a given size (as a non-limiting example, 21 nucleotides) is literally or figuratively (including, e.g., in silico) placed on the target RNA sequence to identify sequences in the size range that can serve as target sequences. By moving the sequence “window” progressively one nucleotide upstream or downstream of an initial target sequence location, the next potential target sequence can be identified, until the complete set of possible sequences is identified for any given target size selected. This process, coupled with systematic synthesis and testing of the identified sequences (using assays as described herein or as known in the art) to identify those sequences that perform optimally can identify those RNA sequences that, when targeted with an iRNA agent, mediate the best inhibition of target gene expression. Thus, while the sequences identified, for example, in a Table 1 represent effective target sequences, it is contemplated that further optimization of inhibition efficiency can be achieved by progressively “walking the window” one nucleotide upstream or downstream of the given sequences to identify sequences with equal or better inhibition characteristics.

[0230] Further, it is contemplated that for any sequence identified, e.g., in Table 1, further optimization could be achieved by systematically either adding or removing nucleotides to generate longer or shorter sequences and testing those sequences generated by walking a window of the longer or shorter size up or down the target RNA from that point. Again, coupling this approach to generating new candidate targets with testing for effectiveness of iRNAs based on those target sequences in an inhibition assay as known in the art and/or as described herein can lead to further improvements in the efficiency of inhibition. Further still, such optimized sequences can be adjusted by, e.g., the introduction of modified nucleotides as described herein or as known in the art, addition or changes in overhang, or other modifications as known in the art and/or discussed herein to further optimize the molecule (e.g., increasing serum stability or circulating half-life, increasing thermal stability, enhancing transmembrane delivery, targeting to a particular location or cell type, increasing interaction with silencing pathway enzymes, increasing release from endosomes) as an expression inhibitor.

[0231] An iRNA as described herein can contain one or more mismatches to the target sequence. In one embodiment, an iRNA as described herein contains no more than 3 mismatches. If the antisense strand of the iRNA contains mismatches to a target sequence, it is preferable that the area of mismatch is not located in the center of the region of complementarity. If the antisense strand of the iRNA contains mismatches to the target sequence, it is preferable that the mismatch be restricted to be within the last 5 nucleotides from either the 5′- or 3′-end of the region of complementarity. For example, for a 23 nucleotide iRNA agent the strand which is complementary to a region of a PCSK9 gene, generally does not contain any mismatch within the central 13 nucleotides. The methods described herein or methods known in the art can be used to determine whether an iRNA containing a mismatch to a target sequence is effective in inhibiting the expression of a PCSK9 gene. Consideration of the efficacy of iRNAs with mismatches in inhibiting expression of a PCSK9 gene is important, especially if the particular region of complementarity in a PCSK9 gene is known to have polymorphic sequence variation within the population.

[0232] The nucleic acids featured in the invention can be synthesized and/or modified by methods well established in the art, such as those described in “Current protocols in nucleic acid chemistry,” Beaucage, S. L. et al. (Edrs.), John Wiley & Sons, Inc., New York, NY, USA, which is hereby incorporated herein by reference. Modifications include, for example, end modifications, e.g., 5′-end modifications (phosphorylation, conjugation, inverted linkages) or 3′-end modifications (conjugation, DNA nucleotides, inverted linkages, etc.); base modifications, e.g., replacement with stabilizing bases, destabilizing bases, or bases that base pair with an expanded repertoire of partners, removal of bases (abasic nucleotides), or conjugated bases; sugar modifications (e.g., at the 2′-position or 4′-position) or replacement of the sugar; and/or backbone modifications, including modification or replacement of the phosphodiester linkages. Specific examples of iRNA compounds useful in the embodiments described herein include, but are not limited to RNAs containing modified backbones or no natural internucleoside linkages. RNAs having modified backbones include, among others, those that do not have a phosphorus atom in the backbone. For the purposes of this specification, and as sometimes referenced in the art, modified RNAs that do not have a phosphorus atom in their internucleoside backbone can also be considered to be oligonucleosides. In some embodiments, a modified iRNA will have a phosphorus atom in its internucleoside backbone.

[0233] Modified RNA backbones include, for example, phosphorothioates, chiral phosphorothioates, phosphorodithioates, phosphotriesters, aminoalkylphosphotriesters, methyl and other alkyl phosphonates including 3′-alkylene phosphonates and chiral phosphonates, phosphinates, phosphoramidates including 3′-amino phosphoramidate and aminoalkylphosphoramidates, thionophosphoramidates, thionoalkylphosphonates, thionoalkylphosphotriesters, and boranophosphates having normal 3′-5′ linkages, 2′-5′-linked analogs of these, and those having inverted polarity wherein the adjacent pairs of nucleoside units are linked 3′-5′ to 5′-3′ or 2′-5′ to 5′-2′. Various salts, mixed salts and free acid forms are also included.

[0234] Representative U.S. patents that teach the preparation of the above phosphorus-containing linkages include, but are not limited to, U.S. Pat. Nos. 3,687,808; 4,469,863; 4,476,301; 5,023,243; 5,177,195; 5,188,897; 5,264,423; 5,276,019; 5,278,302; 5,286,717; 5,321,131; 5,399,676; 5,405,939; 5,453,496; 5,455,233; 5,466,677; 5,476,925; 5,519,126; 5,536,821; 5,541,316; 5,550,111; 5,563,253; 5,571,799; 5,587,361; 5,625,050; 6,028,188; 6,124,445; 6,160,109; 6,169,170; 6,172,209; 6,239,265; 6,277,603; 6,326,199; 6,346,614; 6,444,423; 6,531,590; 6,534,639; 6,608,035; 6,683,167; 6,858,715; 6,867,294; 6,878,805; 7,015,315; 7,041,816; 7,273,933; 7,321,029; and U.S. Pat. RE39464, the entire contents of each of which are hereby incorporated herein by reference.

[0235] Modified RNA backbones that do not include a phosphorus atom therein have backbones that are formed by short chain alkyl or cycloalkyl internucleoside linkages, mixed heteroatoms and alkyl or cycloalkyl internucleoside linkages, or one or more short chain heteroatomic or heterocyclic internucleoside linkages. These include those having morpholino linkages (formed in part from the sugar portion of a nucleoside); siloxane backbones; sulfide, sulfoxide and sulfone backbones; formacetyl and thioformacetyl backbones; methylene formacetyl and thioformacetyl backbones; alkene containing backbones; sulfamate backbones; methylencimino and methylenchydrazino backbones; sulfonate and sulfonamide backbones; amide backbones; and others having mixed N, O, S and CH₂ component parts.

[0236] Representative U.S. patents that teach the preparation of the above oligonucleosides include, but are not limited to, U.S. Pat. Nos. 5,034,506; 5,166,315; 5,185,444; 5,214,134; 5,216,141; 5,235,033; 5,564,562; 5,264,564; 5,405,938; 5,434,257; 5,466,677; 5,470,967; 5,489,677; 5,541,307; 5,561,225; 5,596,086; 5,602,240; 5,608,046; 5,610,289; 5,618,704; 5,623,070; 5,663,312; 5,633,360; 5,677,437; and, 5,677,439, the entire contents of each of which are hereby incorporated herein by reference.

[0237] In other embodiments, suitable RNA mimetics are contemplated for use in iRNAs, in which both the sugar and the internucleoside linkage, i.e., the backbone, of the nucleotide units are replaced with novel groups. The base units are maintained for hybridization with an appropriate nucleic acid target compound. One such oligomeric compound, an RNA mimetic that has been shown to have excellent hybridization properties, is referred to as a peptide nucleic acid (PNA). In PNA compounds, the sugar backbone of an RNA is replaced with an amide containing backbone, in particular an aminoethylglycine backbone. The nucleobases are retained and are bound directly or indirectly to aza nitrogen atoms of the amide portion of the backbone. Representative U.S. patents that teach the preparation of PNA compounds include, but are not limited to, U.S. Pat. Nos. 5,539,082; 5,714,331; and 5,719,262, the entire contents of each of which are hereby incorporated herein by reference. Additional PNA compounds suitable for use in the iRNAs of the invention are described in, for example, in Nielsen et al., Science, 1991, 254, 1497-1500.

[0238] Some embodiments featured in the invention include RNAs with phosphorothioate backbones and oligonucleosides with heteroatom backbones, and in particular —CH₂—NH—CH₂—, —CH₂—N(CH₃)—O—CH₂— [known as a methylene (methylimino) or MMI backbone], —CH₂—O—N(CH₃)—CH₂—, —CH₂—N(CH₃)—N(CH₃)—CH₂— and —N(CH₃)—CH₂—CH₂— [wherein the native phosphodiester backbone is represented as —O—P—O—CH₂— ] of the above-referenced U.S. Pat. No. 5,489,677, and the amide backbones of the above-referenced U.S. Pat. No. 5,602,240. In some embodiments, the RNAs featured herein have morpholino backbone structures of the above-referenced U.S. Pat. No. 5,034,506.

[0239] Modified RNAs can also contain one or more substituted sugar moieties. The iRNAs, e.g., dsRNAs, featured herein can include one of the following at the 2′-position: OH; F; O—, S—, or N-alkyl; O—, S—, or N-alkenyl; O—, S— or N-alkynyl; or O-alkyl-O-alkyl, wherein the alkyl, alkenyl and alkynyl can be substituted or unsubstituted C₁ to C₁₀ alkyl or C₂ to C₁₀ alkenyl and alkynyl. Exemplary suitable modifications include O[(CH₂)ₙO]ₘCH₃, O(CH₂)·ₙOCH₃, O(CH₂)ₙNH₂, O(CH₂)ₙCH₃, O(CH₂)ₙONH₂, and O(CH₂)ₙON[(CH₂)ₙCH₃)]₂, where n and m are from 1 to about 10. In other embodiments, dsRNAs include one of the following at the 2′ position: C₁ to C₁₀ lower alkyl, substituted lower alkyl, alkaryl, aralkyl, O-alkaryl or O-aralkyl, SH, SCH₃, OCN, Cl, Br, CN, CF₃, OCF₃, SOCH₃, SO₂CH₃, ONO₂, NO₂, N₃, NH₂, heterocycloalkyl, heterocycloalkaryl, aminoalkylamino, polyalkylamino, substituted silyl, an RNA cleaving group, a reporter group, an intercalator, a group for improving the pharmacokinetic properties of an iRNA, or a group for improving the pharmacodynamic properties of an iRNA, and other substituents having similar properties. In some embodiments, the modification includes a 2′-methoxyethoxy (2′-O—CH₂CH₂OCH₃, also known as 2′-O-(2-methoxyethyl) or 2′-MOE) (Martin et al., Helv. Chim. Acta, 1995, 78:486-504) i.e., an alkoxy-alkoxy group. Another exemplary modification is 2′-dimethylaminooxyethoxy, i.e., a O(CH₂)₂ON(CH₃)₂ group, also known as 2′-DMAOE, as described in examples herein below, and 2′-dimethylaminoethoxyethoxy (also known in the art as 2′-O-dimethylaminoethoxyethyl or 2′-DMAEOE), i.e., 2′-O—CH₂—O—CH₂—N(CH₂)₂.

[0240] Other modifications include 2′-methoxy (2′-OCH₃), 2′-aminopropoxy (2′-OCH₂CH₂CH₂NH₂) and 2′-fluoro (2′-F). Similar modifications can also be made at other positions on the RNA of an iRNA, particularly the 3′ position of the sugar on the 3′ terminal nucleotide or in 2′-5′ linked dsRNAs and the 5′ position of 5′ terminal nucleotide. iRNAs can also have sugar mimetics such as cyclobutyl moieties in place of the pentofuranosyl sugar. Representative U.S. patents that teach the preparation of such modified sugar structures include, but are not limited to, U.S. Pat. Nos. 4,981,957; 5,118,800; 5,319,080; 5,359,044; 5,393,878; 5,446,137; 5,466,786; 5,514,785; 5,519,134; 5,567,811; 5,576,427; 5,591,722; 5,597,909; 5,610.300; 5,627.053; 5,639,873; 5,646,265; 5,658,873; 5,670,633; and 5,700,920, certain of which are commonly owned with the instant application. The entire contents of each of the foregoing are hereby incorporated herein by reference.

[0241] The RNA of an iRNA can also include nucleobase (often referred to in the art simply as “base”) modifications or substitutions. As used herein, “unmodified” or “natural” nucleobases include the purine bases adenine (A) and guanine (G), and the pyrimidine bases thymine (T), cytosine (C) and uracil (U). Modified nucleobases include other synthetic and natural nucleobases such as deoxy-thymine (dT), 5-methylcytosine (5-me-C), 5-hydroxymethyl cytosine, xanthine, hypoxanthine, 2-aminoadenine, 6-methyl and other alkyl derivatives of adenine and guanine, 2-propyl and other alkyl derivatives of adenine and guanine, 2-thiouracil, 2-thiothymine and 2-thiocytosine, 5-halouracil and cytosine, 5-propynyl uracil and cytosine, 6-azo uracil, cytosine and thymine, 5-uracil (pseudouracil), 4-thiouracil, 8-halo, 8-amino, 8-thiol, 8-thioalkyl, 8-hydroxyl anal other 8-substituted adenines and guanines, 5-halo, particularly 5-bromo, 5-trifluoromethyl and other 5-substituted uracils and cytosines, 7-methylguanine and 7-methyladenine, 8-azaguanine and 8-azaadenine, 7-deazaguanine and 7-daazaadenine and 3-deazaguanine and 3-deazaadenine. Further nucleobases include those disclosed in U.S. Pat. No. 3,687,808, those disclosed in Modified Nucleosides in Biochemistry, Biotechnology and Medicine, Herdewijn, P. ed. Wiley-VCH, 2008; those disclosed in The Concise Encyclopedia Of Polymer Science And Engineering, pages 858-859, Kroschwitz, J. L, ed. John Wiley & Sons, 1990, these disclosed by Englisch et al., Angewandte Chemie, International Edition, 1991, 30, 613, and those disclosed by Sanghvi, Y S., Chapter 15, dsRNA Research and Applications, pages 289-302, Crooke. S. T. and Lebleu, B., Ed., CRC Press, 1993. Certain of these nucleobases are particularly useful for increasing the binding affinity of the oligomeric compounds featured in the invention. These include 5-substituted pyrimidines, 6-azapyrimidines and N-2, N-6 and 0-6 substituted purines, including 2-aminopropyladenine, 5-propynyluracil and 5-propynylcytosine. 5-methylcytosine substitutions have been shown to increase nucleic acid duplex stability by 0.6-1.2° C. (Sanghvi, Y. S., Crooke, S. T. and Lebleu, B., Eds., dsRNA Research and Applications, CRC Press, Boca Raton, 1993, pp. 276-278) and are exemplary base substitutions, even more particularly when combined with 2′-O-methoxyethyl sugar modifications.

[0242] Representative U.S. patents that teach the preparation of certain of the above noted modified nucleobases as well as other modified nucleobases include, but are not limited to, the above noted U.S. Pat. Nos. 3,687,808, 4,845,205; 5,130,30; 5,134,066; 5,175,273; 5,367,066; 5,432,272; 5,457,187; 5,459,255; 5,484,908; 5,502,177; 5,525,711; 5,552,540; 5,587,469; 5,594,121, 5,596,091; 5,614,617; 5,681,941; 5,750,692; 6,015,886; 6,147,200; 6,166,197; 6,222,025; 6,235,887; 6,380,368; 6,528,640; 6,639,062; 6,617,438; 7,045,610; 7,427,672; and 7,495,088, the entire contents of each of which are hereby incorporated herein by reference.

[0243] The RNA of an iRNA can also be modified to include one or more bicyclic sugar moities. A “bicyclic sugar” is a furanosyl ring modified by the bridging of two atoms. A″bicyclic nucleoside” (“BNA”) is a nucleoside having a sugar moiety comprising a bridge connecting two carbon atoms of the sugar ring, thereby forming a bicyclic ring system. In certain embodiments, the bridge connects the 4′-carbon and the 2′-carbon of the sugar ring. Thus, in some embodiments an agent of the invention may include the RNA of an iRNA can also be modified to include one or more locked nucleic acids (LNA). A locked nucleic acid is a nucleotide having a modified ribose moiety in which the ribose moiety comprises an extra bridge connecting the 2′ and 4′ carbons. In other words, an LNA is a nucleotide comprising a bicyclic sugar moiety comprising a 4′-CH2-O-2′ bridge. This structure effectively “locks” the ribose in the 3′-endo structural conformation. The addition of locked nucleic acids to siRNAs has been shown to increase siRNA stability in serum, and to reduce off-target effects (Elmen, J. et al., (2005) Nucleic Acids Research 33(1):439-447; Mook, O R. et al., (2007) Mol Canc Ther 6(3):833-843; Grunweller, A. et al., (2003) Nucleic Acids Research 31(12):3185-3193).

[0244] Examples of bicyclic nucleosides for use in the polynucleotides of the invention include without limitation nucleosides comprising a bridge between the 4′ and the 2′ ribosyl ring atoms. In certain embodiments, the antisense polynucleotide agents of the invention include one or more bicyclic nucleosides comprising a 4′ to 2′ bridge. Examples of such 4′ to 2′ bridged bicyclic nucleosides, include but are not limited to 4′-(CH2)-O-2′ (LNA); 4′-(CH2)-S-2′; 4′-(CH2)2-O-2′ (ENA); 4′-CH(CH3)-O-2′ (also referred to as “constrained ethyl” or “cEt”) and 4′-CH(CH2OCH3)-O-2′ (and analogs thereof; see, e.g., U.S. Pat. No. 7,399,845); 4′-C(CH3)(CH3)-O-2′ (and analogs thereof; see e.g., U.S. Pat. No. 8,278,283); 4′-CH2-N(OCH3)-2′ (and analogs thereof; see e.g., U.S. Pat. No. 8,278,425); 4′-CH2-O—N(CH3)-2′ (see, e.g., U.S. Patent Publication No. 2004/0171570); 4′-CH2-N(R)—O-2′, wherein R is H, C1-C12 alkyl, or a protecting group (see, e.g., U.S. Pat. No. 7,427,672); 4′-CH2-C(H)(CH3)-2′ (see, e.g., Chattopadhyaya et al., J. Org. Chem., 2009, 74, 118-134); and 4′-CH2-C(═CH2)-2′ (and analogs thereof; see, e.g., U.S. Pat. No. 8,278,426). The entire contents of each of the foregoing are hereby incorporated herein by reference.

[0245] Additional representative U.S. Patents and US Patent Publications that teach the preparation of locked nucleic acid nucleotides include, but are not limited to, the following: U.S. Pat. Nos. 6,268,490; 6,525,191; 6,670,461; 6,770,748; 6,794,499; 6,998,484; 7,053,207; 7,034,133; 7,084,125; 7,399,845; 7,427,672; 7,569,686; 7,741,457; 8,022,193; 8,030,467; 8,278,425; 8,278,426; 8,278,283; US 2008/0039618; and US 2009/0012281, the entire contents of each of which are hereby incorporated herein by reference.

[0246] Any of the foregoing bicyclic nucleosides can be prepared having one or more stereochemical sugar configurations including for example α-L-ribofuranose and β-D-ribofuranose (see WO 99/14226).

[0247] The RNA of an iRNA can also be modified to include one or more constrained ethyl nucleotides. As used herein, a “constrained ethyl nucleotide” or “cEt” is a locked nucleic acid comprising a bicyclic sugar moiety comprising a 4′-CH(CH3)-0-2′ bridge. In one embodiment, a constrained ethyl nucleotide is in the S conformation referred to herein as “S-cEt.”

[0248] An iRNA of the invention may also include one or more “conformationally restricted nucleotides” (“CRN”). CRN are nucleotide analogs with a linker connecting the C2′ and C4′ carbons of ribose or the C3 and —C5′ carbons of ribose. CRN lock the ribose ring into a stable conformation and increase the hybridization affinity to mRNA. The linker is of sufficient length to place the oxygen in an optimal position for stability and affinity resulting in less ribose ring puckering.

[0249] Representative publications that teach the preparation of certain of the above noted CRN include, but are not limited to, US Patent Publication No. 2013/0190383; and PCT publication WO 2013/036868, the entire contents of each of which are hereby incorporated herein by reference.

[0250] One or more of the nucleotides of an iRNA of the invention may also include a hydroxymethyl substituted nucleotide. A “hydroxymethyl substituted nucleotide” is an acyclic 2′-3′-seco-nucleotide, also referred to as an “unlocked nucleic acid” (“UNA”) modification

[0251] Representative U.S. publications that teach the preparation of UNA include, but are not limited to, U.S. Pat. No. 8,314,227; and US Patent Publication Nos. 2013/0096289; 2013/0011922; and 2011/0313020, the entire contents of each of which are hereby incorporated herein by reference.

[0252] Other modifications of the nucleotides of an iRNA of the invention include a 5′ phosphate or 5′ phosphate mimic, e.g., a 5′-terminal phosphate or phosphate mimic on the antisense strand of an RNAi agent. Suitable phosphate mimics are disclosed in, for example US Patent Publication No. 2012/0157511, the entire contents of which are incorporated herein by reference.

[0253] Potentially stabilizing modifications to the ends of RNA molecules can include N-(acetylaminocaproyl)-4-hydroxyprolinol (Hyp-C6-NHAc), N-(caproyl-4-hydroxyprolinol (Hyp-C6), N-(acetyl-4-hydroxyprolinol (Hyp-NHAc), thymidine-2′-O-deoxythymidine (ether), N-(aminocaproyl)-4-hydroxyprolinol (Hyp-C6-amino), 2-docosanoyl-uridine-3″-phosphate, inverted base dT(idT) and others. Disclosure of this modification can be found in PCT Publication No. WO 2011/005861.

A. Modified iRNAs Comprising Motifs

[0254] In certain aspects of the invention, the double-stranded RNAi agents of the invention include agents with chemical modifications as disclosed, for example, in U.S. Patent Publication No. 2014/0315835 and PCT Publication No. WO 2013/075035, the entire contents of each of which are incorporated herein by reference, the entire contents of each of which are incorporated herein by reference. As shown herein and in U.S. Patent Publication No. 2014/0315835 and PCT Publication No. WO 2013/075035, a superior result may be obtained by introducing one or more motifs of three identical modifications on three consecutive nucleotides into a sense strand and/or antisense strand of an RNAi agent, particularly at or near the cleavage site. In some embodiments, the sense strand and antisense strand of the RNAi agent may otherwise be completely modified. The introduction of these motifs interrupts the modification pattern, if present, of the sense and/or antisense strand. The RNAi agent may be optionally conjugated with a GalNAc derivative ligand, for instance on the sense strand. The resulting RNAi agents present superior gene silencing activity.

[0255] More specifically, it has been surprisingly discovered that when the sense strand and antisense strand of the double-stranded RNAi agent are completely modified to have one or more motifs of three identical modifications on three consecutive nucleotides at or near the cleavage site of at least one strand of an RNAi agent, the gene silencing activity of the RNAi agent was superiorly enhanced.

[0256] Accordingly, the invention provides double-stranded RNAi agents capable of inhibiting the expression of a target gene (i.e., a PCSK9 gene) in vivo. The RNAi agent comprises a sense strand and an antisense strand. Each strand of the RNAi agent may range from 12-30 nucleotides in length. For example, each strand may be between 14-30 nucleotides in length, 17-30 nucleotides in length, 25-30 nucleotides in length, 27-30 nucleotides in length, 17-23 nucleotides in length, 17-21 nucleotides in length, 17-19 nucleotides in length, 19-25 nucleotides in length, 19-23 nucleotides in length, 19-21 nucleotides in length, 21-25 nucleotides in length, or 21-23 nucleotides in length.

[0257] The sense strand and antisense strand typically form a duplex double stranded RNA (“dsRNA”), also referred to herein as an “RNAi agent.” The duplex region of an RNAi agent may be 12-30 nucleotide pairs in length. For example, the duplex region can be between 14-30 nucleotide pairs in length, 17-30 nucleotide pairs in length, 27-30 nucleotide pairs in length, 17-23 nucleotide pairs in length, 17-21 nucleotide pairs in length, 17-19 nucleotide pairs in length, 19-25 nucleotide pairs in length, 19-23 nucleotide pairs in length, 19-21 nucleotide pairs in length, 21-25 nucleotide pairs in length, or 21-23 nucleotide pairs in length. In another example, the duplex region is selected from 15, 16, 17, 18, 19, 20, 21, 22, 23, 24, 25, 26, and 27 nucleotides in length.

[0258] In one embodiment, the RNAi agent may contain one or more overhang regions and/or capping groups at the 3′-end, 5′-end, or both ends of one or both strands. The overhang can be 1-6 nucleotides in length, for instance 2-6 nucleotides in length, 1-5 nucleotides in length, 2-5 nucleotides in length, 1-4 nucleotides in length, 2-4 nucleotides in length, 1-3 nucleotides in length, 2-3 nucleotides in length, or 1-2 nucleotides in length. The overhangs can be the result of one strand being longer than the other, or the result of two strands of the same length being staggered. The overhang can form a mismatch with the target mRNA or it can be complementary to the gene sequences being targeted or can be another sequence. The first and second strands can also be joined, e.g., by additional bases to form a hairpin, or by other non-base linkers.

[0259] In one embodiment, the nucleotides in the overhang region of the RNAi agent can each independently be a modified or unmodified nucleotide including, but no limited to 2′-sugar modified, such as, 2-F, 2′-Omethyl, thymidine (T), 2′-O-methoxyethyl-5-methyluridine (Teo), 2′-O-methoxyethyladenosine (Aco), 2′-O-methoxyethyl-5-methylcytidine (m5Cco), and any combinations thereof. For example, TT can be an overhang sequence for either end on either strand. The overhang can form a mismatch with the target mRNA or it can be complementary to the gene sequences being targeted or can be another sequence.

[0260] The 5′- or 3′-overhangs at the sense strand, antisense strand or both strands of the RNAi agent may be phosphorylated. In some embodiments, the overhang region(s) contains two nucleotides having a phosphorothioate between the two nucleotides, where the two nucleotides can be the same or different. In one embodiment, the overhang is present at the 3′-end of the sense strand, antisense strand, or both strands. In one embodiment, this 3′-overhang is present in the antisense strand. In one embodiment, this 3′-overhang is present in the sense strand.

[0261] The RNAi agent may contain only a single overhang, which can strengthen the interference activity of the RNAi, without affecting its overall stability. For example, the single-stranded overhang may be located at the 3′-terminal end of the sense strand or, alternatively, at the 3′-terminal end of the antisense strand. The RNAi may also have a blunt end, located at the 5′-end of the antisense strand (or the 3′-end of the sense strand) or vice versa. Generally, the antisense strand of the RNAi has a nucleotide overhang at the 3′-end, and the 5′-end is blunt. While not wishing to be bound by theory, the asymmetric blunt end at the 5′-end of the antisense strand and 3′-end overhang of the antisense strand favor the guide strand loading into RISC process.

[0262] In one embodiment, the RNAi agent is a double ended bluntmer of 19 nucleotides in length, wherein the sense strand contains at least one motif of three 2′-F modifications on three consecutive nucleotides at positions 7, 8, 9 from the 5′end. The antisense strand contains at least one motif of three 2′-O-methyl modifications on three consecutive nucleotides at positions 11, 12, 13 from the 5′end.

[0263] In another embodiment, the RNAi agent is a double ended bluntmer of 20 nucleotides in length, wherein the sense strand contains at least one motif of three 2′-F modifications on three consecutive nucleotides at positions 8, 9, 10 from the 5′end. The antisense strand contains at least one motif of three 2′-O-methyl modifications on three consecutive nucleotides at positions 11, 12, 13 from the 5′end.

[0264] In yet another embodiment, the RNAi agent is a double ended bluntmer of 21 nucleotides in length, wherein the sense strand contains at least one motif of three 2′-F modifications on three consecutive nucleotides at positions 9, 10, 11 from the 5′end. The antisense strand contains at least one motif of three 2′-O-methyl modifications on three consecutive nucleotides at positions 11, 12, 13 from the 5′end.

[0265] In one embodiment, the RNAi agent comprises a 21 nucleotide sense strand and a 23 nucleotide antisense strand, wherein the sense strand contains at least one motif of three 2′-F modifications on three consecutive nucleotides at positions 9, 10, 11 from the 5′end; the antisense strand contains at least one motif of three 2′-O-methyl modifications on three consecutive nucleotides at positions 11, 12, 13 from the 5′end, wherein one end of the RNAi agent is blunt, while the other end comprises a 2 nucleotide overhang. Preferably, the 2 nucleotide overhang is at the 3′-end of the antisense strand. When the 2 nucleotide overhang is at the 3′-end of the antisense strand, there may be two phosphorothioate internucleotide linkages between the terminal three nucleotides, wherein two of the three nucleotides are the overhang nucleotides, and the third nucleotide is a paired nucleotide next to the overhang nucleotide. In one embodiment, the RNAi agent additionally has two phosphorothioate internucleotide linkages between the terminal three nucleotides at both the 5′-end of the sense strand and at the 5′-end of the antisense strand. In one embodiment, every nucleotide in the sense strand and the antisense strand of the RNAi agent, including the nucleotides that are part of the motifs are modified nucleotides. In one embodiment each residue is independently modified with a 2′-O-methyl or 3′-fluoro, e.g., in an alternating motif. Optionally, the RNAi agent further comprises a ligand (preferably GalNAc₃).

[0266] In one embodiment, the RNAi agent comprises a sense and an antisense strand, wherein the sense strand is 25-30 nucleotide residues in length, wherein starting from the 5′ terminal nucleotide (position 1) positions 1 to 23 of the first strand comprise at least 8 ribonucleotides; the antisense strand is 36-66 nucleotide residues in length and, starting from the 3′ terminal nucleotide, comprises at least 8 ribonucleotides in the positions paired with positions 1-23 of sense strand to form a duplex; wherein at least the 3 ‘ terminal nucleotide of antisense strand is unpaired with sense strand, and up to 6 consecutive 3’ terminal nucleotides are unpaired with sense strand, thereby forming a 3′ single stranded overhang of 1-6 nucleotides; wherein the 5′ terminus of antisense strand comprises from 10-30 consecutive nucleotides which are unpaired with sense strand, thereby forming a 10-30 nucleotide single stranded 5′ overhang; wherein at least the sense strand 5′ terminal and 3′ terminal nucleotides are base paired with nucleotides of antisense strand when sense and antisense strands are aligned for maximum complementarity, thereby forming a substantially duplexed region between sense and antisense strands; and antisense strand is sufficiently complementary to a target RNA along at least 19 ribonucleotides of antisense strand length to reduce target gene expression when the double stranded nucleic acid is introduced into a mammalian cell; and wherein the sense strand contains at least one motif of three 2′-F modifications on three consecutive nucleotides, where at least one of the motifs occurs at or near the cleavage site. The antisense strand contains at least one motif of three 2′-O-methyl modifications on three consecutive nucleotides at or near the cleavage site.

[0267] In one embodiment, the RNAi agent comprises sense and antisense strands, wherein the RNAi agent comprises a first strand having a length which is at least 25 and at most 29 nucleotides and a second strand having a length which is at most 30 nucleotides with at least one motif of three 2′-O-methyl modifications on three consecutive nucleotides at position 11, 12, 13 from the 5′ end; wherein the 3′ end of the first strand and the 5′ end of the second strand form a blunt end and the second strand is 1-4 nucleotides longer at its 3′ end than the first strand, wherein the duplex region region which is at least 25 nucleotides in length, and the second strand is sufficiently complementary to a target mRNA along at least 19 nucleotide of the second strand length to reduce target gene expression when the RNAi agent is introduced into a mammalian cell, and wherein dicer cleavage of the RNAi agent preferentially results in an siRNA comprising the 3′ end of the second strand, thereby reducing expression of the target gene in the mammal. Optionally, the RNAi agent further comprises a ligand.

[0268] In one embodiment, the sense strand of the RNAi agent contains at least one motif of three identical modifications on three consecutive nucleotides, where one of the motifs occurs at the cleavage site in the sense strand.

[0269] In one embodiment, the antisense strand of the RNAi agent can also contain at least one motif of three identical modifications on three consecutive nucleotides, where one of the motifs occurs at or near the cleavage site in the antisense strand

[0270] For an RNAi agent having a duplex region of 17-23 nucleotide in length, the cleavage site of the antisense strand is typically around the 10, 11 and 12 positions from the 5′-end. Thus the motifs of three identical modifications may occur at the 9, 10, 11 positions; 10, 11, 12 positions; 11, 12, 13 positions; 12, 13, 14 positions; or 13, 14, 15 positions of the antisense strand, the count starting from the 1^{st} nucleotide from the 5′-end of the antisense strand, or, the count starting from the 1^{st} paired nucleotide within the duplex region from the 5′-end of the antisense strand. The cleavage site in the antisense strand may also change according to the length of the duplex region of the RNAi from the 5′-end.

[0271] The sense strand of the RNAi agent may contain at least one motif of three identical modifications on three consecutive nucleotides at the cleavage site of the strand; and the antisense strand may have at least one motif of three identical modifications on three consecutive nucleotides at or near the cleavage site of the strand. When the sense strand and the antisense strand form a dsRNA duplex, the sense strand and the antisense strand can be so aligned that one motif of the three nucleotides on the sense strand and one motif of the three nucleotides on the antisense strand have at least one nucleotide overlap, i.e., at least one of the three nucleotides of the motif in the sense strand forms a base pair with at least one of the three nucleotides of the motif in the antisense strand. Alternatively, at least two nucleotides may overlap, or all three nucleotides may overlap.

[0272] In one embodiment, the sense strand of the RNAi agent may contain more than one motif of three identical modifications on three consecutive nucleotides. The first motif may occur at or near the cleavage site of the strand and the other motifs may be a wing modification. The term “wing modification” herein refers to a motif occurring at another portion of the strand that is separated from the motif at or near the cleavage site of the same strand. The wing modification is either adjacent to the first motif or is separated by at least one or more nucleotides. When the motifs are immediately adjacent to each other then the chemistry of the motifs are distinct from each other and when the motifs are separated by one or more nucleotide than the chemistries can be the same or different. Two or more wing modifications may be present. For instance, when two wing modifications are present, each wing modification may occur at one end relative to the first motif which is at or near cleavage site or on either side of the lead motif.

[0273] Like the sense strand, the antisense strand of the RNAi agent may contain more than one motifs of three identical modifications on three consecutive nucleotides, with at least one of the motifs occurring at or near the cleavage site of the strand. This antisense strand may also contain one or more wing modifications in an alignment similar to the wing modifications that may be present on the sense strand.

[0274] In one embodiment, the wing modification on the sense strand or antisense strand of the RNAi agent typically does not include the first one or two terminal nucleotides at the 3′-end, 5′-end or both ends of the strand.

[0275] In another embodiment, the wing modification on the sense strand or antisense strand of the RNAi agent typically does not include the first one or two paired nucleotides within the duplex region at the 3′-end, 5′-end or both ends of the strand.

[0276] When the sense strand and the antisense strand of the RNAi agent each contain at least one wing modification, the wing modifications may fall on the same end of the duplex region, and have an overlap of one, two or three nucleotides.

[0277] When the sense strand and the antisense strand of the RNAi agent each contain at least two wing modifications, the sense strand and the antisense strand can be so aligned that two modifications each from one strand fall on one end of the duplex region, having an overlap of one, two or three nucleotides; two modifications each from one strand fall on the other end of the duplex region, having an overlap of one, two or three nucleotides; two modifications one strand fall on each side of the lead motif, having an overlap of one, two or three nucleotides in the duplex region.

[0278] In one embodiment, every nucleotide in the sense strand and antisense strand of the RNAi agent, including the nucleotides that are part of the motifs, may be modified. Each nucleotide may be modified with the same or different modification which can include one or more alteration of one or both of the non-linking phosphate oxygens and/or of one or more of the linking phosphate oxygens; alteration of a constituent of the ribose sugar, e.g., of the 2′ hydroxyl on the ribose sugar; wholesale replacement of the phosphate moiety with “dephospho” linkers; modification or replacement of a naturally occurring base; and replacement or modification of the ribose-phosphate backbone.

[0279] As nucleic acids are polymers of subunits, many of the modifications occur at a position which is repeated within a nucleic acid, e.g., a modification of a base, or a phosphate moiety, or a non-linking O of a phosphate moiety. In some cases the modification will occur at all of the subject positions in the nucleic acid but in many cases it will not. By way of example, a modification may only occur at a 3′ or 5′ terminal position, may only occur in a terminal region, e.g., at a position on a terminal nucleotide or in the last 2, 3, 4, 5, or 10 nucleotides of a strand. A modification may occur in a double strand region, a single strand region, or in both. A modification may occur only in the double strand region of a RNA or may only occur in a single strand region of a RNA. For example, a phosphorothioate modification at a non-linking O position may only occur at one or both termini, may only occur in a terminal region, e.g., at a position on a terminal nucleotide or in the last 2, 3, 4, 5, or 10 nucleotides of a strand, or may occur in double strand and single strand regions, particularly at termini. The 5′ end or ends can be phosphorylated.

[0280] It may be possible, e.g., to enhance stability, to include particular bases in overhangs, or to include modified nucleotides or nucleotide surrogates, in single strand overhangs, e.g., in a 5′ or 3′ overhang, or in both. For example, it can be desirable to include purine nucleotides in overhangs. In some embodiments all or some of the bases in a 3′ or 5′ overhang may be modified, e.g., with a modification described herein. Modifications can include, e.g., the use of modifications at the 2′ position of the ribose sugar with modifications that are known in the art, e.g., the use of deoxyribonucleotides, 2′-deoxy-2′-fluoro (2′-F) or 2′-O-methyl modified instead of the ribosugar of the nucleobase, and modifications in the phosphate group, e.g., phosphorothioate modifications. Overhangs need not be homologous with the target sequence. In one embodiment, each residue of the sense strand and antisense strand is independently modified with LNA, HNA, CeNA, 2′-methoxyethyl, 2′-O-methyl, 2′-O-allyl, 2′-C-allyl, 2′-deoxy, 2′-hydroxyl, or 2′-fluoro. The strands can contain more than one modification. In one embodiment, each residue of the sense strand and antisense strand is independently modified with 2′-O-methyl or 2′-fluoro.

[0281] At least two different modifications are typically present on the sense strand and antisense strand. Those two modifications may be the 2′-O-methyl or 2′-fluoro modifications, or others.

[0282] In one embodiment, the Nₐ and/or N_{b} comprise modifications of an alternating pattern. The term “alternating motif” as used herein refers to a motif having one or more modifications, each modification occurring on alternating nucleotides of one strand. The alternating nucleotide may refer to one per every other nucleotide or one per every three nucleotides, or a similar pattern. For example, if A, B and C each represent one type of modification to the nucleotide, the alternating motif can be “ABABABABABAB . . . ” “AABBAABBAABB . . . ” “AABAABAABAAB . . . ” “AAABAAABAAAB . . . ” “AAABBBAAABBB . . . ” or “ABCABCABCABC . . . ” etc.

[0283] The type of modifications contained in the alternating motif may be the same or different. For example, if A, B, C, D each represent one type of modification on the nucleotide, the alternating pattern, i.e., modifications on every other nucleotide, may be the same, but each of the sense strand or antisense strand can be selected from several possibilities of modifications within the alternating motif such as “ABABAB . . . “, “ACACAC . . . ” “BDBDBD . . . ” or “CDCDCD . . . ” etc.

[0284] In one embodiment, the RNAi agent of the invention comprises the modification pattern for the alternating motif on the sense strand relative to the modification pattern for the alternating motif on the antisense strand is shifted. The shift may be such that the modified group of nucleotides of the sense strand corresponds to a differently modified group of nucleotides of the antisense strand and vice versa. For example, the sense strand when paired with the antisense strand in the dsRNA duplex, the alternating motif in the sense strand may start with “ABABAB” from 5′-3′ of the strand and the alternating motif in the antisense strand may start with “BABABA” from 5′-3′ of the strand within the duplex region. As another example, the alternating motif in the sense strand may start with “AABBAABB” from 5′-3′ of the strand and the alternating motif in the antisenese strand may start with “BBAABBAA” from 5′-3′ of the strand within the duplex region, so that there is a complete or partial shift of the modification patterns between the sense strand and the antisense strand.

[0285] In one embodiment, the RNAi agent comprises the pattern of the alternating motif of 2′-O-methyl modification and 2′-F modification on the sense strand initially has a shift relative to the pattern of the alternating motif of 2′-O-methyl modification and 2′-F modification on the antisense strand initially, i.e., the 2′-O-methyl modified nucleotide on the sense strand base pairs with a 2′-F modified nucleotide on the antisense strand and vice versa. The 1 position of the sense strand may start with the 2′-F modification, and the 1 position of the antisense strand may start with the 2′-O-methyl modification.

[0286] The introduction of one or more motifs of three identical modifications on three consecutive nucleotides to the sense strand and/or antisense strand interrupts the initial modification pattern present in the sense strand and/or antisense strand. This interruption of the modification pattern of the sense and/or antisense strand by introducing one or more motifs of three identical modifications on three consecutive nucleotides to the sense and/or antisense strand surprisingly enhances the gene silencing activity to the target gene.

[0287] In one embodiment, when the motif of three identical modifications on three consecutive nucleotides is introduced to any of the strands, the modification of the nucleotide next to the motif is a different modification than the modification of the motif. For example, the portion of the sequence containing the motif is “ . . . . NₐYYYN_{b} . . . ” where “Y” represents the modification of the motif of three identical modifications on three consecutive nucleotide, and “Nₐ” and “N_{b}” represent a modification to the nucleotide next to the motif “YYY” that is different than the modification of Y, and where Nₐ and N_{b} can be the same or different modifications. Alternatively. Nₐ and/or N_{b} may be present or absent when there is a wing modification present.

[0288] The RNAi agent may further comprise at least one phosphorothioate or methylphosphonate internucleotide linkage. The phosphorothioate or methylphosphonate internucleotide linkage modification may occur on any nucleotide of the sense strand or antisense strand or both strands in any position of the strand. For instance, the internucleotide linkage modification may occur on every nucleotide on the sense strand and/or antisense strand; each internucleotide linkage modification may occur in an alternating pattern on the sense strand and/or antisense strand; or the sense strand or antisense strand may contain both internucleotide linkage modifications in an alternating pattern. The alternating pattern of the internucleotide linkage modification on the sense strand may be the same or different from the antisense strand, and the alternating pattern of the internucleotide linkage modification on the sense strand may have a shift relative to the alternating pattern of the internucleotide linkage modification on the antisense strand. In one embodiment, a double-stranded RNAi agent comprises 6-8phosphorothioate internucleotide linkages. In one embodiment, the antisense strand comprises two phosphorothioate internucleotide linkages at the 5′-terminus and two phosphorothioate internucleotide linkages at the 3′-terminus, and the sense strand comprises at least two phosphorothioate internucleotide linkages at either the 5′-terminus or the 3′-terminus.

[0289] In one embodiment, the RNAi comprises a phosphorothioate or methylphosphonate internucleotide linkage modification in the overhang region. For example, the overhang region may contain two nucleotides having a phosphorothioate or methylphosphonate internucleotide linkage between the two nucleotides. Internucleotide linkage modifications also may be made to link the overhang nucleotides with the terminal paired nucleotides within the duplex region. For example, at least 2, 3, 4, or all the overhang nucleotides may be linked through phosphorothioate or methylphosphonate internucleotide linkage, and optionally, there may be additional phosphorothioate or methylphosphonate internucleotide linkages linking the overhang nucleotide with a paired nucleotide that is next to the overhang nucleotide. For instance, there may be at least two phosphorothioate internucleotide linkages between the terminal three nucleotides, in which two of the three nucleotides are overhang nucleotides, and the third is a paired nucleotide next to the overhang nucleotide. These terminal three nucleotides may be at the 3′-end of the antisense strand, the 3′-end of the sense strand, the 5′-end of the antisense strand, and/or the 5′end of the antisense strand.

[0290] In one embodiment, the 2 nucleotide overhang is at the 3′-end of the antisense strand, and there are two phosphorothioate internucleotide linkages between the terminal three nucleotides, wherein two of the three nucleotides are the overhang nucleotides, and the third nucleotide is a paired nucleotide next to the overhang nucleotide. Optionally, the RNAi agent may additionally have two phosphorothioate internucleotide linkages between the terminal three nucleotides at both the 5′-end of the sense strand and at the 5′-end of the antisense strand.

[0291] In one embodiment, the RNAi agent comprises mismatch(es) with the target, within the duplex, or combinations thereof. The mistmatch may occur in the overhang region or the duplex region. The base pair may be ranked on the basis of their propensity to promote dissociation or melting (e.g., on the free energy of association or dissociation of a particular pairing, the simplest approach is to examine the pairs on an individual pair basis, though next neighbor or similar analysis can also be used). In terms of promoting dissociation: A:U is preferred over G:C; G:U is preferred over G:C; and I:C is preferred over G:C (I=inosine). Mismatches, e.g., non-canonical or other than canonical pairings (as described elsewhere herein) are preferred over canonical (A:T, A:U, G:C) pairings; and pairings which include a universal base are preferred over canonical pairings.

[0292] In one embodiment, the RNAi agent comprises at least one of the first 1, 2, 3, 4, or 5 base pairs within the duplex regions from the 5′-end of the antisense strand independently selected from the group of: A:U, G:U, I:C, and mismatched pairs, e.g., non-canonical or other than canonical pairings or pairings which include a universal base, to promote the dissociation of the antisense strand at the 5′-end of the duplex.

[0293] In one embodiment, the nucleotide at the 1 position within the duplex region from the 5′-end in the antisense strand is selected from the group consisting of A, dA, dU, U, and dT. Alternatively, at least one of the first 1, 2 or 3 base pair within the duplex region from the 5′-end of the antisense strand is an AU base pair. For example, the first base pair within the duplex region from the 5′-end of the antisense strand is an AU base pair.

[0294] In another embodiment, the nucleotide at the 3′-end of the sense strand is deoxy-thymine (dT). In another embodiment, the nucleotide at the 3′-end of the antisense strand is deoxy-thymine (dT). In one embodiment, there is a short sequence of deoxy-thymine nucleotides, for example, two dT nucleotides on the 3′-end of the sense and/or antisense strand.

[0295] In one embodiment, the sense strand sequence may be represented by formula (I):

(I)
5′ nₚ-Nₐ-(X X X)ᵢ-N_{b}-Y Y Y -N_{b}-(Z Z Z)ⱼ-Nₐ-n_{q} 3′

[0296] wherein:
[0297] i and j are each independently 0 or 1;
[0298] p and q are each independently 0-6;
   each Nₐ independently represents an oligonucleotide sequence comprising 0-25 modified nucleotides, each sequence comprising at least two differently modified nucleotides;
   each N_{b} independently represents an oligonucleotide sequence comprising 0-10 modified nucleotides;
   each nₚ and n_{q} independently represent an overhang nucleotide;
   wherein Nb and Y do not have the same modification; and
   XXX, YYY and ZZZ each independently represent one motif of three identical modifications on three consecutive nucleotides. Preferably YYY is all 2′-F modified nucleotides.

[0299] In one embodiment, the Nₐ and/or N_{b} comprise modifications of alternating pattern. In one embodiment, the YYY motif occurs at or near the cleavage site of the sense strand. For example, when the RNAi agent has a duplex region of 17-23 nucleotides in length, the YYY motif can occur at or the vicinity of the cleavage site (e.g.: can occur at positions 6, 7, 8, 7, 8, 9, 8, 9, 10, 9, 10, 11, 10, 11,12 or 11, 12, 13) of—the sense strand, the count starting from the 1^{st} nucleotide, from the 5′-end; or optionally, the count starting at the 1^{st} paired nucleotide within the duplex region, from the 5′-end.

[0300] In one embodiment, i is 1 and j is 0, or i is 0 and j is 1, or both i and j are 1. The sense strand can therefore be represented by the following formulas:

(Ib)
5′ nₚ-Nₐ-YYY-N_{b}-ZZZ-Nₐ-n_{q} 3′;
(Ic)
5′ nₚ-Nₐ-XXX-N_{b}-YYY-Nₐ-n_{q} 3′;
or
(Id)
5′ nₚ-Nₐ-XXX-N_{b}-YYY-N_{b}-ZZZ-Nₐ-n_{q} 3′.

[0301] When the sense strand is represented by formula (Ib), N_{b} represents an oligonucleotide sequence comprising 0-10, 0-7, 0-5, 0-4, 0-2 or 0 modified nucleotides. Each Nₐ independently can represent an oligonucleotide sequence comprising 2-20, 2-15, or 2-10 modified nucleotides.

[0302] When the sense strand is represented as formula (Ic), N_{b} represents an oligonucleotide sequence comprising 0-10, 0-7, 0-10, 0-7, 0-5, 0-4, 0-2 or 0 modified nucleotides. Each Nₐ can independently represent an oligonucleotide sequence comprising 2-20, 2-15, or 2-10 modified nucleotides.

[0303] When the sense strand is represented as formula (Id), each N_{b} independently represents an oligonucleotide sequence comprising 0-10, 0-7, 0-5, 0-4, 0-2 or 0 modified nucleotides. Preferably, N_{b} is 0, 1, 2, 3, 4, 5 or 6 Each Nₐ can independently represent an oligonucleotide sequence comprising 2-20, 2-15, or 2-10 modified nucleotides.

Each of X, Y and Z may be the same or different from each other.

[0304] In other embodiments, i is 0 and j is 0, and the sense strand may be represented by the formula:

(Ia)
5′ nₚ-Nₐ-YYY-Nₐ-n_{q} 3′.

[0305] When the sense strand is represented by formula (Ia), each Nₐ independently can represent an oligonucleotide sequence comprising 2-20, 2-15, or 2-10 modified nucleotides.

[0306] In one embodiment, the antisense strand sequence of the RNAi may be represented by formula (II):

(II)
5′ n_{q′}-Nₐ′-(Z′Z′Z′)ₖ-N_{b}′-Y′Y′Y′-N_{b}′-(X′X′X′)ₗ-N′ₐ-nₚ′
3′

[0307] wherein:
[0308] k and I are each independently 0 or 1;
[0309] p′ and q′ are each independently 0-6;
   each Nₐ′ independently represents an oligonucleotide sequence comprising 0-25 modified nucleotides, each sequence comprising at least two differently modified nucleotides;
   each N_{b}′ independently represents an oligonucleotide sequence comprising 0-10 modified nucleotides;
   each nₚ′ and n_{q}′ independently represent an overhang nucleotide;
   wherein N_{b}′ and Y′ do not have the same modification;
   and X′X′X′, Y′Y′Y′ and Z′Z′Z′ each independently represent one motif of three identical modifications on three consecutive nucleotides.

[0310] In one embodiment, the Nₐ′ and/or N_{b}′ comprise modifications of alternating pattern.

[0311] The Y′Y′Y′ motif occurs at or near the cleavage site of the antisense strand. For example, when the RNAi agent has a duplex region of 17-23nucleotidein length, the Y′Y′Y′ motif can occur at positions 9, 10, 11; 10, 11, 12; 11, 12, 13; 12, 13, 14; or 13, 14, 15 of the antisense strand, with the count starting from the 1^{st} nucleotide, from the 5′-end; or optionally, the count starting at the 1^{st} paired nucleotide within the duplex region, from the 5′-end. Preferably, the Y′Y′Y′ motif occurs at positions 11, 12, 13.

[0312] In one embodiment, Y′Y′Y′ motif is all 2′-OMe modified nucleotides.

[0313] In one embodiment, k is 1 and l is 0, or k is 0 and l is 1, or both k and 1 are 1.

[0314] The antisense strand can therefore be represented by the following formulas:

(IIb)
5′ n_{q′}-Nₐ′-Z′Z′Z′-N_{b}′-Y′Y′Y′-Nₐ′-n_{p′} 3′;
(IIc)
5′ n_{q′}-Nₐ′-Y′Y′Y′-N_{b}′-X′X′X′-Nₐ′-n_{p′} 3′;
or
(IId)
5′ n_{q′}-Nₐ′-Z′Z′Z′-N_{b}′-Y′Y′Y′-N_{b}′-X′X′X′-Nₐ′-n_{p′} 3′.

[0315] When the antisense strand is represented by formula (IIb), N_{b}′ represents an oligonucleotide sequence comprising 0-10, 0-7, 0-10, 0-7, 0-5, 0-4, 0-2 or 0 modified nucleotides. Each Nₐ′ independently represents an oligonucleotide sequence comprising 2-20, 2-15, or 2-10 modified nucleotides.

[0316] When the antisense strand is represented as formula (IIc), N_{b}′ represents an oligonucleotide sequence comprising 0-10, 0-7, 0-10, 0-7, 0-5, 0-4, 0-2 or 0 modified nucleotides. Each Nₐ′ independently represents an oligonucleotide sequence comprising 2-20, 2-15, or 2-10 modified nucleotides.

[0317] When the antisense strand is represented as formula (IId), each N_{b}′ independently represents an oligonucleotide sequence comprising 0-10, 0-7, 0-10, 0-7, 0-5, 0-4, 0-2 or 0 modified nucleotides. Each Nₐ′ independently represents an oligonucleotide sequence comprising 2-20, 2-15, or 2-10 modified nucleotides. Preferably, N_{b} is 0, 1, 2, 3, 4, 5 or 6. In other embodiments, k is 0 and l is 0 and the antisense strand may be represented by the formula:

(Ia)
5′ n_{p′}-N_{a′}-Y′Y′Y′-N_{a′}-n_{q′} 3′.

[0318] When the antisense strand is represented as formula (IIa), each Nₐ′ independently represents an oligonucleotide sequence comprising 2-20, 2-15, or 2-10 modified nucleotides. Each of X′, Y′ and Z′ may be the same or different from each other.

[0319] Each nucleotide of the sense strand and antisense strand may be independently modified with LNA, HNA, CeNA, 2′-methoxyethyl, 2′-O-methyl, 2′-O-allyl, 2′-C-allyl, 2′-hydroxyl, or 2′-fluoro. For example, each nucleotide of the sense strand and antisense strand is independently modified with 2′-O-methyl or 2′-fluoro. Each X, Y, Z, X′, Y′ and Z′, in particular, may represent a 2′-O-methyl modification or a 2′-fluoro modification.

[0320] In one embodiment, the sense strand of the RNAi agent may contain YYY motif occurring at 9, 10 and 11 positions of the strand when the duplex region is 21 nt, the count starting from the 1^{st} nucleotide from the 5′-end, or optionally, the count starting at the 1^{st} paired nucleotide within the duplex region, from the 5′-end; and Y represents 2′-F modification. The sense strand may additionally contain XXX motif or ZZZ motifs as wing modifications at the opposite end of the duplex region; and XXX and ZZZ each independently represents a 2′-OMe modification or 2′-F modification.

[0321] In one embodiment the antisense strand may contain Y′Y′Y′ motif occurring at positions 11, 12, 13 of the strand, the count starting from the 1^{st} nucleotide from the 5′-end, or optionally, the count starting at the 1^{st} paired nucleotide within the duplex region, from the 5′-end; and Y′ represents 2′-O-methyl modification. The antisense strand may additionally contain X′X′X′ motif or Z′Z′Z′ motifs as wing modifications at the opposite end of the duplex region; and X′X′X′ and Z′Z′Z′ each independently represents a 2′-OMe modification or 2′-F modification. The sense strand represented by any one of the above formulas (Ia), (Ib), (Ic), and (Id) forms a duplex with a antisense strand being represented by any one of formulas (IIa), (IIb), (IIc), and (IId), respectively.

[0322] Accordingly, the RNAi agents for use in the methods of the invention may comprise a sense strand and an antisense strand, each strand having 14 to 30 nucleotides, the RNAi duplex represented by formula (III):

(III)
sense:
5′ nₚ-Nₐ-(X X X)ᵢ-N_{b}-Y Y Y-N_{b}-(Z Z Z)ⱼ-Nₐ-n_{q} 3′
antisense:
3′ nₚ′-Nₐ′-(X′X′X′)ₖ-N_{b}′-Y′Y′Y′-N_{b}′-(Z′Z′Z′)ₗ-Nₐ′-n_{q}
5′

[0323] wherein:
[0324] i, j, k, and I are each independently 0 or 1;
[0325] p, p′, q, and q′ are each independently 0-6;
   each Nₐ and Nₐ′ independently represents an oligonucleotide sequence comprising 0-25 modified nucleotides, each sequence comprising at least two differently modified nucleotides;
   each N_{b} and N_{b}′ independently represents an oligonucleotide sequence comprising 0-10 modified nucleotides;
   wherein
   each nₚ′, nₚ, n_{q}′, and n_{q}, each of which may or may not be present, independently represents an overhang nucleotide; and
   XXX, YYY, ZZZ, X′X′X′, Y′Y′Y′, and Z′Z′Z′ each independently represent one motif of three identical modifications on three consecutive nucleotides.

[0326] In one embodiment, i is 0 and j is 0; or i is 1 and j is 0; or i is 0 and j is 1; or both i and j are 0; or both i and j are 1. In another embodiment, k is 0 and l is 0; or k is 1 and l is 0; k is 0 and l is 1; or both k and l are 0; or both k and l are 1.

[0327] Exemplary combinations of the sense strand and antisense strand forming a RNAi duplex include the formulas below:

(IIIa)
5′ nₚ-Nₐ-Y Y Y-Nₐ-n_{q} 3′
3′ nₚ′-Nₐ′-Y′Y′Y′-Nₐ′n_{q}′ 5′
(IIIb)
5′ nₚ-Nₐ-Y Y Y-N_{b}-Z Z Z-Nₐ-n_{q} 3′
3′ nₚ′-Nₐ′-Y′Y′Y′-N_{b}′-Z′Z′Z′-Nₐ′n_{q}′ 5′
(IIIc)
5′ nₚ-Nₐ-X X X-N_{b}-Y Y Y-Nₐ-n_{q} 3′
3′ nₚ′-Nₐ′-X′X′X′-N_{b}′-Y′Y′Y′-Nₐ′-n_{q}′ 5′
(IIId)
5′ nₚ-Nₐ-X X X-N_{b}-Y Y Y-N_{b}-Z Z Z-Nₐ-n_{q} 3′
3′ nₚ′-Nₐ′-X′X′X′-N_{b}′-Y′Y′Y′-N_{b}′-Z′Z′Z′-Nₐ-n_{q}′ 5′

[0328] When the RNAi agent is represented by formula (IIIa), each Nₐ independently represents an oligonucleotide sequence comprising 2-20, 2-15, or 2-10 modified nucleotides.

[0329] When the RNAi agent is represented by formula (IIIb), each N_{b} independently represents an oligonucleotide sequence comprising 1-10, 1-7, 1-5 or 1-4 modified nucleotides. Each Nₐ independently represents an oligonucleotide sequence comprising 2-20, 2-15, or 2-10 modified nucleotides.

[0330] When the RNAi agent is represented as formula (IIIc), each N_{b}, N_{b}′ independently represents an oligonucleotide sequence comprising 0-10, 0-7, 0-10, 0-7, 0-5, 0-4, 0-2 or 0 modified nucleotides. Each Nₐ independently represents an oligonucleotide sequence comprising 2-20, 2-15, or 2-10 modified nucleotides.

[0331] When the RNAi agent is represented as formula (IIId), each N_{b}, N_{b}′ independently represents an oligonucleotide sequence comprising 0-10, 0-7, 0-10, 0-7, 0-5, 0-4, 0-2 or 0 modified nucleotides. Each Nₐ, Nₐ′ independently represents an oligonucleotide sequence comprising 2-20, 2-15, or 2-10 modified nucleotides. Each of Nₐ, Nₐ′, N_{b} and N_{b}′ independently comprises modifications of alternating pattern.

[0332] Each of X, Y and Z in formulas (III), (IIIa), (IIIb), (IIIc), and (IIId) may be the same or different from each other.

[0333] When the RNAi agent is represented by formula (III), (IIIa), (IIIb), (IIIc), and (IIId), at least one of the Y nucleotides may form a base pair with one of the Y′ nucleotides. Alternatively, at least two of the Y nucleotides form base pairs with the corresponding Y′ nucleotides; or all three of the Y nucleotides all form base pairs with the corresponding Y′ nucleotides.

[0334] When the RNAi agent is represented by formula (IIIb) or (IIId), at least one of the Z nucleotides may form a base pair with one of the Z′ nucleotides. Alternatively, at least two of the Z nucleotides form base pairs with the corresponding Z′ nucleotides; or all three of the Z nucleotides all form base pairs with the corresponding Z′ nucleotides.

[0335] When the RNAi agent is represented as formula (IIIc) or (IIId), at least one of the X nucleotides may form a base pair with one of the X′ nucleotides. Alternatively, at least two of the X nucleotides form base pairs with the corresponding X′ nucleotides; or all three of the X nucleotides all form base pairs with the corresponding X′ nucleotides.

[0336] In one embodiment, the modification on the Y nucleotide is different than the modification on the Y′ nucleotide, the modification on the Z nucleotide is different than the modification on the Z′ nucleotide, and/or the modification on the X nucleotide is different than the modification on the X′ nucleotide.

[0337] In one embodiment, when the RNAi agent is represented by formula (IIId), the Nₐ modifications are 2′-O-methyl or 2′-fluoro modifications. In another embodiment, when the RNAi agent is represented by formula (IIId), the Nₐ modifications are 2′-O-methyl or 2′-fluoro modifications and nₚ′>0 and at least one nₚ′ is linked to a neighboring nucleotide a via phosphorothioate linkage. In yet another embodiment, when the RNAi agent is represented by formula (IIId), the Nₐ modifications are 2′-O-methyl or 2′-fluoro modifications, nₚ′>0 and at least one nₚ′ is linked to a neighboring nucleotide via phosphorothioate linkage, and the sense strand is conjugated to one or more GalNAc derivatives attached through a bivalent or trivalent branched linker (described below). In another embodiment, when the RNAi agent is represented by formula (IIId), the Nₐ modifications are 2′-O-methyl or 2′-fluoro modifications, nₚ′>0 and at least one nₚ′ is linked to a neighboring nucleotide via phosphorothioate linkage, the sense strand comprises at least one phosphorothioate linkage, and the sense strand is conjugated to one or more GalNAc derivatives attached through a bivalent or trivalent branched linker.

[0338] In one embodiment, when the RNAi agent is represented by formula (IIIa), the Nₐ modifications are 2′-O-methyl or 2′-fluoro modifications, nₚ′>0 and at least one nₚ′ is linked to a neighboring nucleotide via phosphorothioate linkage, the sense strand comprises at least one phosphorothioate linkage, and the sense strand is conjugated to one or more GalNAc derivatives attached through a bivalent or trivalent branched linker.

[0339] In one embodiment, the RNAi agent is a multimer containing at least two duplexes represented by formula (III), (IIIa), (IIIb), (IIIc), and (IIId), wherein the duplexes are connected by a linker. The linker can be cleavable or non-cleavable. Optionally, the multimer further comprises a ligand. Each of the duplexes can target the same gene or two different genes; or each of the duplexes can target same gene at two different target sites.

[0340] In one embodiment, the RNAi agent is a multimer containing three, four, five, six or more duplexes represented by formula (III), (IIIa), (IIIb), (IIIc), and (IIId), wherein the duplexes are connected by a linker. The linker can be cleavable or non-cleavable. Optionally, the multimer further comprises a ligand. Each of the duplexes can target the same gene or two different genes; or each of the duplexes can target same gene at two different target sites. In one embodiment, two RNAi agents represented by formula (III), (IIIa), (IIIb), (IIIc), and (IIId) are linked to each other at the 5′ end, and one or both of the 3′ ends and are optionally conjugated to to a ligand. Each of the agents can target the same gene or two different genes; or each of the agents can target same gene at two different target sites.

[0341] Various publications describe multimeric RNAi agents that can be used in the methods of the invention. Such publications include WO2007/091269, U.S. Pat. No. 7,858,769, WO2010/141511, WO2007/117686, WO2009/014887 and WO2011/031520 the entire contents of each of which are hereby incorporated herein by reference.

[0342] As described in more detail below, the RNAi agent that contains conjugations of one or more carbohydrate moieties to a RNAi agent can optimize one or more properties of the RNAi agent. In many cases, the carbohydrate moiety will be attached to a modified subunit of the RNAi agent. For example, the ribose sugar of one or more ribonucleotide subunits of a dsRNA agent can be replaced with another moiety, e.g., a non-carbohydrate (preferably cyclic) carrier to which is attached a carbohydrate ligand. A ribonucleotide subunit in which the ribose sugar of the subunit has been so replaced is referred to herein as a ribose replacement modification subunit (RRMS). A cyclic carrier may be a carbocyclic ring system, i.e., all ring atoms are carbon atoms, or a heterocyclic ring system, i.e., one or more ring atoms may be a heteroatom, e.g., nitrogen, oxygen, sulfur. The cyclic carrier may be a monocyclic ring system, or may contain two or more rings, e.g. fused rings. The cyclic carrier may be a fully saturated ring system, or it may contain one or more double bonds.

[0343] The ligand may be attached to the polynucleotide via a carrier. The carriers include (i) at least one “backbone attachment point,” preferably two “backbone attachment points” and (ii) at least one “tethering attachment point.” A “backbone attachment point” as used herein refers to a functional group, e.g. a hydroxyl group, or generally, a bond available for, and that is suitable for incorporation of the carrier into the backbone, e.g., the phosphate, or modified phosphate, e.g., sulfur containing, backbone, of a ribonucleic acid. A “tethering attachment point” (TAP) in some embodiments refers to a constituent ring atom of the cyclic carrier, e.g., a carbon atom or a heteroatom (distinct from an atom which provides a backbone attachment point), that connects a selected moiety. The moiety can be, e.g., a carbohydrate, e.g. monosaccharide, disaccharide, trisaccharide, tetrasaccharide, oligosaccharide and polysaccharide. Optionally, the selected moiety is connected by an intervening tether to the cyclic carrier. Thus, the cyclic carrier will often include a functional group, e.g., an amino group, or generally, provide a bond, that is suitable for incorporation or tethering of another chemical entity, e.g., a ligand to the constituent ring.

[0344] The RNAi agents may be conjugated to a ligand via a carrier, wherein the carrier can be cyclic group or acyclic group; preferably, the cyclic group is selected from pyrrolidinyl, pyrazolinyl, pyrazolidinyl, imidazolinyl, imidazolidinyl, piperidinyl, piperazinyl, [1,3]dioxolane, oxazolidinyl, isoxazolidinyl, morpholinyl, thiazolidinyl, isothiazolidinyl, quinoxalinyl, pyridazinonyl, tetrahydrofuryl and and decalin; preferably, the acyclic group is selected from serinol backbone or diethanolamine backbone.

[0345] In certain specific embodiments, the RNAi agent for use in the methods of the invention is an agent selected from the group of agents listed in any one of Tables 3, 4, 5, 6, 18, 19, 20, 21, and 23. These agents may further comprise a ligand.

### IV. IRNAS CONJUGATED TO LIGANDS

[0346] Another modification of the RNA of an iRNA suitable for use in the methods of the invention involves chemically linking to the RNA one or more ligands, moieties or conjugates that enhance the activity, cellular distribution or cellular uptake of the iRNA. Such moieties include but are not limited to lipid moieties such as a cholesterol moiety (Letsinger et al., Proc. Natl. Acid. Sci. USA. 1989, 86: 6553-6556), cholic acid (Manoharan et al., Biorg. Med. Chem. Let., 1994, 4:1053-1060), a thiocther, e.g., beryl-S-tritylthiol (Manoharan et al., Ann. N.Y. Acad. Sci., 1992, 660:306-309; Manoharan et al., Biorg. Med. Chem. Let., 1993, 3:2765-2770), a thiocholesterol (Oberhauser et al., Nucl. Acids Res., 1992, 20:533-538), an aliphatic chain, e.g., dodecandiol or undecyl residues (Saison-Bchmoaras et al., EMBO J, 1991, 10:1111-1118; Kabanov et al., FEBS Lett., 1990, 259:327-330; Svinarchuk et al., Biochimie, 1993, 75:49-54), a phospholipid, e.g., di-hexadecyl-rac-glycerol or triethyl-ammonium 1,2-di-O-hexadecyl-rac-glycero-3-phosphonate (Manoharan et al., Tetrahedron Lett., 1995, 36:3651-3654; Shea et al., Nucl. Acids Res., 1990, 18:3777-3783), a polyamine or a polyethylene glycol chain (Manoharan et al., Nucleosides & Nucleotides, 1995, 14:969-973), or adamantane acetic acid (Manoharan et al., Tetrahedron Lett., 1995, 36:3651-3654), a palmityl moiety (Mishra et al., Biochim. Biophys. Acta, 1995, 1264:229-237), or an octadecylamine or hexylamino-carbonyloxycholesterol moiety (Crooke et al., J. Pharmacol. Exp. Ther., 1996, 277:923-937).

[0347] In one embodiment, a ligand alters the distribution, targeting or lifetime of an iRNA agent into which it is incorporated. In preferred embodiments a ligand provides an enhanced affinity for a selected target, e.g., molecule, cell or cell type, compartment, e.g., a cellular or organ compartment, tissue, organ or region of the body, as, e.g., compared to a species absent such a ligand. Preferred ligands will not take part in duplex pairing in a duplexed nucleic acid.

[0348] Ligands can include a naturally occurring substance, such as a protein (e.g., human serum albumin (HSA), low-density lipoprotein (LDL), or globulin); carbohydrate (e.g., a dextran, pullulan, chitin, chitosan, inulin, cyclodextrin, N-acetylgalactosamine, or hyaluronic acid); or a lipid. The ligand can also be a recombinant or synthetic molecule, such as a synthetic polymer, e.g., a synthetic polyamino acid. Examples of polyamino acids include polyamino acid is a polylysine (PLL), poly L-aspartic acid, poly L-glutamic acid, styrene-maleic acid anhydride copolymer, poly(L-lactide-co-glycolied) copolymer, divinyl ether-maleic anhydride copolymer, N-(2-hydroxypropyl)methacrylamide copolymer (HMPA), polyethylene glycol (PEG), polyvinyl alcohol (PVA), polyurethane, poly(2-ethylacryllic acid), N-isopropylacrylamide polymers, or polyphosphazine. Example of polyamines include: polyethylenimine, polylysine (PLL), spermine, spermidine, polyamine, pseudopeptide-polyamine, peptidomimetic polyamine, dendrimer polyamine, arginine, amidine, protamine, cationic lipid, cationic porphyrin, quaternary salt of a polyamine, or an alpha helical peptide.

[0349] Ligands can also include targeting groups, e.g., a cell or tissue targeting agent, e.g., a lectin, glycoprotein, lipid or protein, e.g., an antibody, that binds to a specified cell type such as a kidney cell. A targeting group can be a thyrotropin, melanotropin, lectin, glycoprotein, surfactant protein A. Mucin carbohydrate, multivalent lactose, monovalent or multivalent galactose, N-acetyl-galactosamine, N-acetyl-gulucoseamine multivalent mannose, multivalent fucose, glycosylated polyaminoacids, transferrin, bisphosphonate, polyglutamate, polyaspartate, a lipid, cholesterol, a steroid, bile acid, folate, vitamin B12, vitamin A, biotin, or an RGD peptide or RGD peptide mimetic. In certain embodiments, ligands include monovalent or multivalent galactose. In certain embodiments, ligands include cholesterol.

[0350] Other examples of ligands include dyes, intercalating agents (e.g. acridines), cross-linkers (e.g. psoralene, mitomycin C), porphyrins (TPPC4, texaphyrin, Sapphyrin), polycyclic aromatic hydrocarbons (e.g., phenazine, dihydrophenazine), artificial endonucleases (e.g. EDTA), lipophilic molecules, e.g., cholesterol, cholic acid, adamantane acetic acid, 1-pyrene butyric acid, dihydrotestosterone, 1,3-Bis —O(hexadecyl)glycerol, geranyloxyhexyl group, hexadecylglycerol, borneol, menthol, 1,3-propanediol, heptadecyl group, palmitic acid, myristic acid, O3-(oleoyl)lithocholic acid, O3-(oleoyl)cholenic acid, dimethoxytrityl, or phenoxazine) and peptide conjugates (e.g., antennapedia peptide, Tat peptide), alkylating agents, phosphate, amino, mercapto, PEG (e.g., PEG-40K), MPEG, [MPEG]2, polyamino, alkyl, substituted alkyl, radiolabeled markers, enzymes, haptens (e.g. biotin), transport/absorption facilitators (e.g., aspirin, vitamin E, folic acid), synthetic ribonucleases (e.g., imidazole, bisimidazole, histamine, imidazole clusters, acridine-imidazole conjugates, Eu3+ complexes of tetraazamacrocycles), dinitrophenyl, HRP, or AP.

[0351] Ligands can be proteins, e.g., glycoproteins, or peptides, e.g., molecules having a specific affinity for a co-ligand, or antibodies e.g., an antibody, that binds to a specified cell type such as a hepatic cell. Ligands can also include hormones and hormone receptors. They can also include non-peptidic species, such as lipids, lectins, carbohydrates, vitamins, cofactors, multivalent lactose, multivalent galactose, N-acetyl-galactosamine, N-acetyl-gulucosamine multivalent mannose, or multivalent fucose. The ligand can be, for example, a lipopolysaccharide, an activator of p38 MAP kinase, or an activator of NF-κB.

[0352] The ligand can be a substance, e.g., a drug, which can increase the uptake of the iRNA agent into the cell, for example, by disrupting the cell's cytoskeleton, e.g., by disrupting the cell's microtubules, microfilaments, and/or intermediate filaments. The drug can be, for example, taxon, vincristine, vinblastine, cytochalasin, nocodazole, japlakinolide, latrunculin A, phalloidin, swinholide A, indanocine, or myoservin.

[0353] In some embodiments, a ligand attached to an iRNA as described herein acts as a pharmacokinetic modulator (PK modulator). PK modulators include lipophiles, bile acids, steroids, phospholipid analogues, peptides, protein binding agents, PEG, vitamins etc. Exemplary PK modulators include, but are not limited to, cholesterol, fatty acids, cholic acid, lithocholic acid, dialkylglycerides, diacylglyceride, phospholipids, sphingolipids, naproxen, ibuprofen, vitamin E, biotin etc. Oligonucleotides that comprise a number of phosphorothioate linkages are also known to bind to serum protein, thus short oligonucleotides, e.g., oligonucleotides of about 5 bases, 10 bases, 15 bases or 20 bases, comprising multiple of phosphorothioate linkages in the backbone are also amenable to the present invention as ligands (e.g. as PK modulating ligands). In addition, aptamers that bind serum components (e.g. serum proteins) are also suitable for use as PK modulating ligands in the embodiments described herein.

[0354] Ligand-conjugated oligonucleotides of the invention may be synthesized by the use of an oligonucleotide that bears a pendant reactive functionality, such as that derived from the attachment of a linking molecule onto the oligonucleotide (described below). This reactive oligonucleotide may be reacted directly with commercially-available ligands, ligands that are synthesized bearing any of a variety of protecting groups, or ligands that have a linking moiety attached thereto.

[0355] The oligonucleotides used in the conjugates of the present invention may be conveniently and routinely made through the well-known technique of solid-phase synthesis. Equipment for such synthesis is sold by several vendors including, for example, Applied Biosystems (Foster City, Calif.). Any other means for such synthesis known in the art may additionally or alternatively be employed. It is also known to use similar techniques to prepare other oligonucleotides, such as the phosphorothioates and alkylated derivatives.

[0356] In the ligand-conjugated oligonucleotides and ligand-molecule bearing sequence-specific linked nucleosides of the present invention, the oligonucleotides and oligonucleosides may be assembled on a suitable DNA synthesizer utilizing standard nucleotide or nucleoside precursors, or nucleotide or nucleoside conjugate precursors that already bear the linking moiety, ligand-nucleotide or nucleoside-conjugate precursors that already bear the ligand molecule, or non-nucleoside ligand-bearing building blocks.

[0357] When using nucleotide-conjugate precursors that already bear a linking moiety, the synthesis of the sequence-specific linked nucleosides is typically completed, and the ligand molecule is then reacted with the linking moiety to form the ligand-conjugated oligonucleotide. In some embodiments, the oligonucleotides or linked nucleosides of the present invention are synthesized by an automated synthesizer using phosphoramidites derived from ligand-nucleoside conjugates in addition to the standard phosphoramidites and non-standard phosphoramidites that are commercially available and routinely used in oligonucleotide synthesis.

### A. Lipid Conjugates

[0358] In one embodiment, the ligand or conjugate is a lipid or lipid-based molecule. Such a lipid or lipid-based molecule preferably binds a serum protein, e.g., human serum albumin (HSA). An HSA binding ligand allows for distribution of the conjugate to a target tissue, e.g., a non-kidney target tissue of the body. For example, the target tissue can be the liver, including parenchymal cells of the liver. Other molecules that can bind HSA can also be used as ligands. For example, naproxen or aspirin can be used. A lipid or lipid-based ligand can (a) increase resistance to degradation of the conjugate, (b) increase targeting or transport into a target cell or cell membrane, and/or (c) can be used to adjust binding to a serum protein, e.g., HSA.

[0359] A lipid based ligand can be used to inhibit, e.g., control the binding of the conjugate to a target tissue. For example, a lipid or lipid-based ligand that binds to HSA more strongly will be less likely to be targeted to the kidney and therefore less likely to be cleared from the body. A lipid or lipid-based ligand that binds to HSA less strongly can be used to target the conjugate to the kidney.

[0360] In a preferred embodiment, the lipid based ligand binds HSA. Preferably, it binds HSA with a sufficient affinity such that the conjugate will be preferably distributed to a non-kidney tissue. However, it is preferred that the affinity not be so strong that the HSA-ligand binding cannot be reversed.

[0361] In another preferred embodiment, the lipid based ligand binds HSA weakly or not at all, such that the conjugate will be preferably distributed to the kidney. Other moieties that target to kidney cells can also be used in place of or in addition to the lipid based ligand.

[0362] In another aspect, the ligand is a moiety, e.g., a vitamin, which is taken up by a target cell, e.g., a proliferating cell. These are particularly useful for treating disorders characterized by unwanted cell proliferation, e.g., of the malignant or non-malignant type, e.g., cancer cells. Exemplary vitamins include vitamin A, E, and K. Other exemplary vitamins include are B vitamin, e.g., folic acid, B12, riboflavin, biotin, pyridoxal or other vitamins or nutrients taken up by target cells such as liver cells. Also included are HSA and low density lipoprotein (LDL).

### B. Cell Permeation Agents

[0363] In another aspect, the ligand is a cell-permeation agent, preferably a helical cell-permeation agent. Preferably, the agent is amphipathic. An exemplary agent is a peptide such as tat or antennopedia. If the agent is a peptide, it can be modified, including a peptidylmimetic, invertomers, non-peptide or pseudo-peptide linkages, and use of D-amino acids. The helical agent is preferably an alpha-helical agent, which preferably has a lipophilic and a lipophobic phase.

[0364] The ligand can be a peptide or peptidomimetic. A peptidomimetic (also referred to herein as an oligopeptidomimetic) is a molecule capable of folding into a defined three-dimensional structure similar to a natural peptide. The attachment of peptide and peptidomimetics to iRNA agents can affect pharmacokinetic distribution of the iRNA, such as by enhancing cellular recognition and absorption. The peptide or peptidomimetic moiety can be about 5-50 amino acids long, e.g., about 5, 10, 15, 20, 25, 30, 35, 40, 45, or 50 amino acids long.

[0365] A peptide or peptidomimetic can be, for example, a cell permeation peptide, cationic peptide, amphipathic peptide, or hydrophobic peptide (e.g., consisting primarily of Tyr, Trp or Phe). The peptide moiety can be a dendrimer peptide, constrained peptide or crosslinked peptide. In another alternative, the peptide moiety can include a hydrophobic membrane translocation sequence (MTS). An exemplary hydrophobic MTS-containing peptide is RFGF having the amino acid sequence AAVALLPAVLLALLAP (SEQ ID NO: 3). An RFGF analogue (e.g., amino acid sequence AALLPVLLAAP (SEQ ID NO: 4) containing a hydrophobic MTS can also be a targeting moiety. The peptide moiety can be a “delivery” peptide, which can carry large polar molecules including peptides, oligonucleotides, and protein across cell membranes. For example, sequences from the HIV Tat protein (GRKKRRQRRRPPQ (SEQ ID NO: 5) and the Drosophila Antennapedia protein (RQIKIWFQNRRMKWKK (SEQ ID NO: 6) have been found to be capable of functioning as delivery peptides. A peptide or peptidomimetic can be encoded by a random sequence of DNA, such as a peptide identified from a phage-display library, or one-bead-one-compound (OBOC) combinatorial library (Lam et al., Nature, 354:82-84, 1991). Examples of a peptide or peptidomimetic tethered to a dsRNA agent via an incorporated monomer unit for cell targeting purposes is an arginine-glycine-aspartic acid (RGD)-peptide, or RGD mimic. A peptide moiety can range in length from about 5 amino acids to about 40 amino acids. The peptide moieties can have a structural modification, such as to increase stability or direct conformational properties. Any of the structural modifications described below can be utilized.

[0366] An RGD peptide for use in the compositions and methods of the invention may be linear or cyclic, and may be modified, e.g., glycosylated or methylated, to facilitate targeting to a specific tissue(s). RGD-containing peptides and peptidiomimemtics may include D-amino acids, as well as synthetic RGD mimics. In addition to RGD, one can use other moieties that target the integrin ligand. Preferred conjugates of this ligand target PECAM-1 or VEGF.

[0367] A “cell permeation peptide” is capable of permeating a cell, e.g., a microbial cell, such as a bacterial or fungal cell, or a mammalian cell, such as a human cell. A microbial cell-permeating peptide can be, for example, a α-helical linear peptide (e.g., LL-37 or Ceropin P1), a disulfide bond-containing peptide (e.g., α-defensin, β-defensin or bactenecin), or a peptide containing only one or two dominating amino acids (e.g., PR-39 or indolicidin). A cell permeation peptide can also include a nuclear localization signal (NLS). For example, a cell permeation peptide can be a bipartite amphipathic peptide, such as MPG, which is derived from the fusion peptide domain of HIV-1 gp41 and the NLS of SV40 large T antigen (Simconi et al., Nucl. Acids Res. 31:2717-2724, 2003).

### C. Carbohydrate Conjugates

[0368] In some embodiments of the compositions and methods of the invention, an iRNA oligonucleotide further comprises a carbohydrate. The carbohydrate conjugated iRNA are advantageous for the in vivo delivery of nucleic acids, as well as compositions suitable for in vivo therapeutic use, as described herein. As used herein, “carbohydrate” refers to a compound which is either a carbohydrate per se made up of one or more monosaccharide units having at least 6 carbon atoms (which can be linear, branched or cyclic) with an oxygen, nitrogen or sulfur atom bonded to each carbon atom; or a compound having as a part thereof a carbohydrate moiety made up of one or more monosaccharide units each having at least six carbon atoms (which can be linear, branched or cyclic), with an oxygen, nitrogen or sulfur atom bonded to each carbon atom. Representative carbohydrates include the sugars (mono-, di-, tri- and oligosaccharides containing from about 4, 5, 6, 7, 8, or 9 monosaccharide units), and polysaccharides such as starches, glycogen, cellulose and polysaccharide gums. Specific monosaccharides include C5 and above (e.g., C5, C6, C7, or C8) sugars; di- and trisaccharides include sugars having two or three monosaccharide units (e.g., C5, C6, C7, or C8).

[0369] In one embodiment, a carbohydrate conjugate for use in the compositions and methods of the invention is a monosaccharide. In another embodiment, a carbohydrate conjugate for use in the compositions and methods of the invention is selected from the group consisting of:

[chemical structure]

[chemical structure]

[chemical structure]

[chemical structure]

[chemical structure]

[0370] In one embodiment, the monosaccharide is an N-acetylgalactosamine, such as

[chemical structure]

[0371] Another representative carbohydrate conjugate for use in the embodiments described herein includes, but is not limited to,

[chemical structure]

[0372] (Formula XXIII), when one of X or Y is an oligonucleotide, the other is a hydrogen.

[0373] In certain embodiments of the invention, the GalNAc or GalNAc derivative is attached to an iRNA agent of the invention via a monovalent linker. In some embodiments, the GalNAc or GalNAc derivative is attached to an iRNA agent of the invention via a bivalent linker. In yet other embodiments of the invention, the GalNAc or GalNAc derivative is attached to an iRNA agent of the invention via a trivalent linker.

[0374] In one embodiment, the double stranded RNAi agents of the invention comprise one GalNAc or GalNAc derivative attached to the iRNA agent. In another embodiment, the double stranded RNAi agents of the invention comprise a plurality (e.g., 2, 3, 4, 5, or 6) GalNAc or GalNAc derivatives, each independently attached to a plurality of nucleotides of the double stranded RNAi agent through a plurality of monovalent linkers.

[0375] In some embodiments, for example, when the two strands of an iRNA agent of the invention are part of one larger molecule connected by an uninterrupted chain of nucleotides between the 3′-end of one strand and the 5′-end of the respective other strand forming a hairpin loop comprising, a plurality of unpaired nucleotides, each unpaired nucleotide within the hairpin loop may independently comprise a GalNAc or GalNAc derivative attached via a monovalent linker. The hairpin loop may also be formed by an extended overhang in one strand of the duplex.

[0376] In some embodiments, the carbohydrate conjugate further comprises one or more additional ligands as described above, such as, but not limited to, a PK modulator and/or a cell permeation peptide.

[0377] Additional carbohydrate conjugates suitable for use in the present invention include those described in PCT Publication Nos. WO 2014/179620 and WO 2014/179627, the entire contents of each of which are incorporated herein by reference.

### D. Linkers

[0378] In some embodiments, the conjugate or ligand described herein can be attached to an iRNA oligonucleotide with various linkers that can be cleavable or non-cleavable.

[0379] The term “linker” or “linking group” means an organic moiety that connects two parts of a compound, e.g., covalently attaches two parts of a compound. Linkers typically comprise a direct bond or an atom such as oxygen or sulfur, a unit such as NR8, C(O), C(O)NH, SO, SO₂, SO₂NH or a chain of atoms, such as, but not limited to, substituted or unsubstituted alkyl, substituted or unsubstituted alkenyl, substituted or unsubstituted alkynyl, arylalkyl, arylalkenyl, arylalkynyl, heteroarylalkyl, heteroarylalkenyl, heteroarylalkynyl, heterocyclylalkyl, heterocyclylalkenyl, heterocyclylalkynyl, aryl, heteroaryl, heterocyclyl, cycloalkyl, cycloalkenyl, alkylarylalkyl, alkylarylalkenyl, alkylarylalkynyl, alkenylarylalkyl, alkenylarylalkenyl, alkenylarylalkynyl, alkynylarylalkyl, alkynylarylalkenyl, alkynylarylalkynyl, alkylheteroarylalkyl, alkylheteroarylalkenyl, alkylheteroarylalkynyl, alkenylheteroarylalkyl, alkenylheteroarylalkenyl, alkenylheteroarylalkynyl, alkynylheteroarylalkyl, alkynylheteroarylalkenyl, alkynylheteroarylalkynyl, alkylheterocyclylalkyl, alkylheterocyclylalkenyl, alkylhererocyclylalkynyl, alkenylheterocyclylalkyl, alkenylheterocyclylalkenyl, alkenylheterocyclylalkynyl, alkynylheterocyclylalkyl, alkynylheterocyclylalkenyl, alkynylheterocyclylalkynyl, alkylaryl, alkenylaryl, alkynylaryl, alkylheteroaryl, alkenylheteroaryl, alkynylhereroaryl, which one or more methylenes can be interrupted or terminated by O. S. S(O), SO₂, N(R8), C(O), substituted or unsubstituted aryl, substituted or unsubstituted heteroaryl, substituted or unsubstituted heterocyclic; where R8 is hydrogen, acyl, aliphatic or substituted aliphatic. In one embodiment, the linker is between about 1-24 atoms, 2-24, 3-24, 4-24, 5-24, 6-24, 6-18, 7-18, 8-18 atoms, 7-17, 8-17, 6-16, 7-16, or 8-16 atoms.

[0380] A cleavable linking group is one which is sufficiently stable outside the cell, but which upon entry into a target cell is cleaved to release the two parts the linker is holding together. In a preferred embodiment, the cleavable linking group is cleaved at least about 10 times, 20, times, 30 times, 40 times, 50 times, 60 times, 70 times, 80 times, 90 times or more, or at least about 100 times faster in a target cell or under a first reference condition (which can, e.g., be selected to mimic or represent intracellular conditions) than in the blood of a subject, or under a second reference condition (which can, e.g., be selected to mimic or represent conditions found in the blood or serum).

[0381] Cleavable linking groups are susceptible to cleavage agents, e.g., pH, redox potential or the presence of degradative molecules. Generally, cleavage agents are more prevalent or found at higher levels or activities inside cells than in serum or blood. Examples of such degradative agents include: redox agents which are selected for particular substrates or which have no substrate specificity, including, e.g., oxidative or reductive enzymes or reductive agents such as mercaptans, present in cells, that can degrade a redox cleavable linking group by reduction; esterases; endosomes or agents that can create an acidic environment, e.g., those that result in a pH of five or lower; enzymes that can hydrolyze or degrade an acid cleavable linking group by acting as a general acid, peptidases (which can be substrate specific), and phosphatases.

[0382] A cleavable linkage group, such as a disulfide bond can be susceptible to pH. The pH of human serum is 7.4, while the average intracellular pH is slightly lower, ranging from about 7.1-7.3. Endosomes have a more acidic pH, in the range of 5.5-6.0, and lysosomes have an even more acidic pH at around 5.0. Some linkers will have a cleavable linking group that is cleaved at a preferred pH, thereby releasing a cationic lipid from the ligand inside the cell, or into the desired compartment of the cell.

[0383] A linker can include a cleavable linking group that is cleavable by a particular enzyme. The type of cleavable linking group incorporated into a linker can depend on the cell to be targeted. For example, a liver-targeting ligand can be linked to a cationic lipid through a linker that includes an ester group. Liver cells are rich in esterases, and therefore the linker will be cleaved more efficiently in liver cells than in cell types that are not esterase-rich. Other cell-types rich in esterases include cells of the lung, renal cortex, and testis.

[0384] Linkers that contain peptide bonds can be used when targeting cell types rich in peptidases, such as liver cells and synoviocytes.

[0385] In general, the suitability of a candidate cleavable linking group can be evaluated by testing the ability of a degradative agent (or condition) to cleave the candidate linking group. It will also be desirable to also test the candidate cleavable linking group for the ability to resist cleavage in the blood or when in contact with other non-target tissue. Thus, one can determine the relative susceptibility to cleavage between a first and a second condition, where the first is selected to be indicative of cleavage in a target cell and the second is selected to be indicative of cleavage in other tissues or biological fluids, e.g., blood or serum. The evaluations can be carried out in cell free systems, in cells, in cell culture, in organ or tissue culture, or in whole animals. It can be useful to make initial evaluations in cell-free or culture conditions and to confirm by further evaluations in whole animals. In preferred embodiments, useful candidate compounds are cleaved at least about 2, 4, 10, 20, 30, 40, 50, 60, 70, 80, 90, or about 100 times faster in the cell (or under in vitro conditions selected to mimic intracellular conditions) as compared to blood or serum (or under in vitro conditions selected to mimic extracellular conditions).

i. Redox Cleavable Linking Groups

[0386] In one embodiment, a cleavable linking group is a redox cleavable linking group that is cleaved upon reduction or oxidation. An example of reductively cleavable linking group is a disulphide linking group (—S—S—). To determine if a candidate cleavable linking group is a suitable “reductively cleavable linking group,” or for example is suitable for use with a particular iRNA moiety and particular targeting agent one can look to methods described herein. For example, a candidate can be evaluated by incubation with dithiothreitol (DTT), or other reducing agent using reagents know in the art, which mimic the rate of cleavage which would be observed in a cell, e.g., a target cell. The candidates can also be evaluated under conditions which are selected to mimic blood or serum conditions. In one, candidate compounds are cleaved by at most about 10% in the blood. In other embodiments, useful candidate compounds are degraded at least about 2, 4, 10, 20, 30, 40, 50, 60, 70, 80, 90, or about 100 times faster in the cell (or under in vitro conditions selected to mimic intracellular conditions) as compared to blood (or under in vitro conditions selected to mimic extracellular conditions). The rate of cleavage of candidate compounds can be determined using standard enzyme kinetics assays under conditions chosen to mimic intracellular media and compared to conditions chosen to mimic extracellular media.

ii. Phosphate-Based Cleavable Linking Groups

[0387] In another embodiment, a cleavable linker comprises a phosphate-based cleavable linking group. A phosphate-based cleavable linking group is cleaved by agents that degrade or hydrolyze the phosphate group. An example of an agent that cleaves phosphate groups in cells are enzymes such as phosphatases in cells. Examples of phosphate-based linking groups are —O—P(O)(ORk)-O—, —O—P(S)(ORk)-O—, —O—P(S)(SRk)-O—, —S—P(O)(ORk)-O—, —O—P(O)(ORk)-S—, —S—P(O)(ORk)-S—, —O—P(S)(ORk)-S—, —S—P(S)(ORk)-O—, —O—P(O)(Rk)-O—, —O—P(S)(Rk)-O—, —S—P(O)(Rk)-O—, —S—P(S)(Rk)-O—, —S—P(O)(Rk)-S—, —O—P(S)(Rk)-S—. Preferred embodiments are —O—P(O)(OH)—O—, —O—P(S)(OH)—O—, —O—P(S)(SH)—O—, —S—P(O)(OH)—O—, —O—P(O)(OH)—S—, —S—P(O)(OH)—S—, —O—P(S)(OH)—S—, —S—P(S)(OH)—O—, —O—P(O)(H)—O—, —O—P(S)(H)—O—, —S—P(O)(H)—O, —S—P(S)(H)—O—, —S—P(O)(H)—S—, —O—P(S)(H)—S—. A preferred embodiment is —O—P(O)(OH)—O—. These candidates can be evaluated using methods analogous to those described above.

iii. Acid Cleavable Linking Groups

[0388] In another embodiment, a cleavable linker comprises an acid cleavable linking group. An acid cleavable linking group is a linking group that is cleaved under acidic conditions. In preferred embodiments acid cleavable linking groups are cleaved in an acidic environment with a pH of about 6.5 or lower (e.g., about 6.0, 5.75, 5.5, 5.25, 5.0, or lower), or by agents such as enzymes that can act as a general acid. In a cell, specific low pH organelles, such as endosomes and lysosomes can provide a cleaving environment for acid cleavable linking groups. Examples of acid cleavable linking groups include but are not limited to hydrazones, esters, and esters of amino acids. Acid cleavable groups can have the general formula —C═NN—, C(O)O, or —OC(O). A preferred embodiment is when the carbon attached to the oxygen of the ester (the alkoxy group) is an aryl group, substituted alkyl group, or tertiary alkyl group such as dimethyl pentyl or t-butyl. These candidates can be evaluated using methods analogous to those described above.

iv. Ester-Based Linking Groups

[0389] In another embodiment, a cleavable linker comprises an ester-based cleavable linking group. An ester-based cleavable linking group is cleaved by enzymes such as esterases and amidases in cells. Examples of ester-based cleavable linking groups include but are not limited to esters of alkylene, alkenylene and alkynylene groups. Ester cleavable linking groups have the general formula —C(O)O—, or —OC(O)—. These candidates can be evaluated using methods analogous to those described above.

v. Peptide-Based Cleaving Groups

[0390] In yet another embodiment, a cleavable linker comprises a peptide-based cleavable linking group. A peptide-based cleavable linking group is cleaved by enzymes such as peptidases and proteases in cells. Peptide-based cleavable linking groups are peptide bonds formed between amino acids to yield oligopeptides (e.g., dipeptides, tripeptides etc.) and polypeptides. Peptide-based cleavable groups do not include the amide group (—C(O)NH—). The amide group can be formed between any alkylene, alkenylene or alkynelene. A peptide bond is a special type of amide bond formed between amino acids to yield peptides and proteins. The peptide based cleavage group is generally limited to the peptide bond (i.e., the amide bond) formed between amino acids yielding peptides and proteins and does not include the entire amide functional group. Peptide-based cleavable linking groups have the general formula —NHCHRAC(O)NHCHRBC(O)—, where RA and RB are the R groups of the two adjacent amino acids. These candidates can be evaluated using methods analogous to those described above.

[0391] In one embodiment, an iRNA of the invention is conjugated to a carbohydrate through a linker. Non-limiting examples of iRNA carbohydrate conjugates with linkers of the compositions and methods of the invention include, but are not limited to,

[chemical structure]

[chemical structure]

[chemical structure]

when one of X or Y is an oligonucleotide, the other is a hydrogen.

[0392] In certain embodiments of the compositions and methods of the invention, a ligand is one or more GalNAc (N-acetylgalactosamine) derivatives attached through a bivalent or trivalent branched linker.

[0393] In one embodiment, a dsRNA of the invention is conjugated to a bivalent or trivalent branched linker selected from the group of structures shown in any of formula (XXXII)-(XXXV):

[chemical structure]

wherein:
q2A, q2B, q3A, q3B, q4A, q4B, q5A, q5B and q5C represent independently for each occurrence 0-20 and wherein the repeating unit can be the same or different;
P^{2A}, P^{2B}, P^{3A}, P^{3B}, P^{4A}, P^{4B}, P^{5A}, P^{5B}, P^{5C}, T^{2A}, T^{2B}, T^{3A}, T^{3B}, T^{4A}, T^{4B}, T^{4A}, T^{5B}, T^{5C} are each independently for each occurrence absent, CO, NH, O, S, OC(O), NHC(O), CH₂, CH₂NH or CH₂O;
[0394] Q^{2A}, Q^{2B}, Q^{3A}, Q^{3B}, Q^{4A}, Q^{4B}, Q^{5A}, Q^{5B}, Q^{5C} are independently for each occurrence absent, alkylene, substituted alkylene wherein one or more methylenes can be interrupted or terminated by one or more of O, S, S(O), SO₂, N(R^{N}), C(R′)═C(R″), C≡C or C(O); R^{2A}, R^{2B}, R^{3A}, R^{3B}, R^{4A}, R^{4B}, R^{5A}, R^{5B}, R^{5C} are each independently for each occurrence absent, NH, O, S, CH₂, C(O)O, C(O)NH, NHCH(R^{a})C(O), —C(O)—CH(R^{a})—NH—, CO, CH═N—O,

[chemical structure]

or heterocyclyl;
[0395] L^{2A}, L^{2B}, L^{3A}, L^{3B}, L^{4A}, L^{4B}, L^{5A}, L^{5B} and L^{5C} represent the ligand; i.e. each independently for each occurrence a monosaccharide (such as GalNAc), disaccharide, trisaccharide, tetrasaccharide, oligosaccharide, or polysaccharide; and R^{a} is H or amino acid side chain. Trivalent conjugating GalNAc derivatives are particularly useful for use with RNAi agents for inhibiting the expression of a target gene, such as those of formula (XXXVI):

[chemical structure]

[0396] wherein L^{5A}, L^{5B} and L^{5C} represent a monosaccharide, such as GalNAc derivative.

[0397] Examples of suitable bivalent and trivalent branched linker groups conjugating GalNAc derivatives include, but are not limited to, the structures recited above as formulas II, VII, XI, X, and XIII.

[0398] Representative U.S. patents that teach the preparation of RNA conjugates include, but are not limited to, U.S. Pat. Nos. 4,828,979; 4,948,882; 5,218,105; 5,525,465; 5,541,313; 5,545,730; 5,552,538; 5,578,717, 5,580,731; 5,591,584; 5,109,124; 5,118,802; 5,138,045; 5,414,077; 5,486,603; 5,512,439; 5,578,718; 5,608,046; 4,587,044; 4,605,735; 4,667,025; 4,762,779; 4,789,737; 4,824,941; 4,835,263; 4,876,335; 4,904,582; 4,958,013; 5,082,830; 5,112,963; 5,214,136; 5,082,830; 5,112,963; 5,214,136; 5,245,022; 5,254,469; 5,258,506; 5,262,536; 5,272,250; 5,292,873; 5,317,098; 5,371,241, 5,391,723; 5,416,203, 5,451,463; 5,510,475; 5,512,667; 5,514,785; 5,565,552; 5,567,810; 5,574,142; 5,585,481; 5,587,371; 5,595,726; 5,597,696; 5,599,923; 5,599,928 and 5,688,941; 6,294,664; 6,320,017; 6,576,752; 6,783,931; 6,900,297; 7,037,646; 8,106,022, the entire contents of each of which are hereby incorporated herein by reference.

[0399] It is not necessary for all positions in a given compound to be uniformly modified, and in fact more than one of the aforementioned modifications can be incorporated in a single compound or even at a single nucleoside within an iRNA. The present invention also includes iRNA compounds that are chimeric compounds.

[0400] “Chimeric” iRNA compounds or “chimeras,” in the context of this invention, are iRNA compounds, preferably dsRNAs, which contain two or more chemically distinct regions, each made up of at least one monomer unit, i.e., a nucleotide in the case of a dsRNA compound. These iRNAs typically contain at least one region wherein the RNA is modified so as to confer upon the iRNA increased resistance to nuclease degradation, increased cellular uptake, and/or increased binding affinity for the target nucleic acid. An additional region of the iRNA can serve as a substrate for enzymes capable of cleaving RNA:DNA or RNA:RNA hybrids. By way of example, RNase H is a cellular endonuclease which cleaves the RNA strand of an RNA:DNA duplex. Activation of RNase H, therefore, results in cleavage of the RNA target, thereby greatly enhancing the efficiency of iRNA inhibition of gene expression. Consequently, comparable results can often be obtained with shorter iRNAs when chimeric dsRNAs are used, compared to phosphorothioate deoxy dsRNAs hybridizing to the same target region. Cleavage of the RNA target can be routinely detected by gel electrophoresis and, if necessary, associated nucleic acid hybridization techniques known in the art.

[0401] In certain instances, the RNA of an iRNA can be modified by a non-ligand group. A number of non-ligand molecules have been conjugated to iRNAs in order to enhance the activity, cellular distribution or cellular uptake of the iRNA, and procedures for performing such conjugations are available in the scientific literature. Such non-ligand moieties have included lipid moieties, such as cholesterol (Kubo, T. et al., Biochem. Biophys. Res. Comm., 2007, 365(1):54-61; Letsinger et al., Proc. Natl. Acad. Sci. USA, 1989, 86:6553), cholic acid (Manoharan et al., Bioorg. Med. Chem. Lett., 1994, 4:1053), a thioether, e.g., hexyl-S-tritylthiol (Manoharan et al., Ann. N.Y. Acad. Sci., 1992, 660:306; Manoharan et al., Bioorg. Med. Chem. Let., 1993, 3:2765), a thiocholesterol (Oberhauser et al., Nucl. Acids Res., 1992, 20:533), an aliphatic chain, e.g., dodecandiol or undecyl residues (Saison-Bchmoaras et al., EMBO J., 1991, 10:111; Kabanov et al., FEBS Lett., 1990, 259:327; Svinarchuk et al., Biochimie, 1993, 75:49), a phospholipid, e.g., di-hexadecyl-rac-glycerol or triethylammonium 1,2-di-O-hexadecyl-rac-glycero-3-H-phosphonate (Manoharan et al., Tetrahedron Lett., 1995, 36:3651; Shea et al., Nucl. Acids Res., 1990, 18:3777), a polyamine or a polyethylene glycol chain (Manoharan et al., Nucleosides & Nucleotides, 1995, 14:969), or adamantane acetic acid (Manoharan et al., Tetrahedron Lett., 1995, 36:3651), a palmityl moiety (Mishra et al., Biochim. Biophys. Acta, 1995, 1264:229), or an octadecylamine or hexylamino-carbonyl-oxycholesterol moiety (Crooke et al., J. Pharmacol. Exp. Ther., 1996, 277:923). Representative United States patents that teach the preparation of such RNA conjugates have been listed above. Typical conjugation protocols involve the synthesis of an RNAs bearing an amino linker at one or more positions of the sequence. The amino group is then reacted with the molecule being conjugated using appropriate coupling or activating reagents. The conjugation reaction can be performed either with the RNA still bound to the solid support or following cleavage of the RNA, in solution phase. Purification of the RNA conjugate by HPLC typically affords the pure conjugate.

### IV. DELIVERY OF AN IRNA OF THE INVENTION

[0402] The delivery of an iRNA of the invention to a cell e.g., a cell within a subject, such as a human subject (e.g., a subject in need thereof, such as a subject having a disorder that would benefit from reduction in PCSK9 expression) can be achieved in a number of different ways. For example, delivery may be performed by contacting a cell with an iRNA of the invention either in vitro or in vivo. In vivo delivery may also be performed directly by administering a composition comprising an iRNA, e.g., a dsRNA, to a subject. Alternatively, in vivo delivery may be performed indirectly by administering one or more vectors that encode and direct the expression of the iRNA. These alternatives are discussed further below.

[0403] In general, any method of delivering a nucleic acid molecule (in vitro or in vivo) can be adapted for use with an iRNA of the invention (see e.g., Akhtar S. and Julian R L. (1992) Trends Cell. Biol. 2(5): 139-144 and WO94/02595, which are incorporated herein by reference in their entireties). For in vivo delivery, factors to consider in order to deliver an iRNA molecule include, for example, biological stability of the delivered molecule, prevention of non-specific effects, and accumulation of the delivered molecule in the target tissue. The non-specific effects of an iRNA can be minimized by local administration, for example, by direct injection or implantation into a tissue or topically administering the preparation. Local administration to a treatment site maximizes local concentration of the agent, limits the exposure of the agent to systemic tissues that can otherwise be harmed by the agent or that can degrade the agent, and permits a lower total dose of the iRNA molecule to be administered. Several studies have shown successful knockdown of gene products when an iRNA is administered locally. For example, intraocular delivery of a VEGF dsRNA by intravitreal injection in cynomolgus monkeys (Tolentino, M J., et al (2004) Retina 24:132-138) and subretinal injections in mice (Reich, S J., et al (2003) Mol. Vis. 9:210-216) were both shown to prevent neovascularization in an experimental model of age-related macular degeneration. In addition, direct intratumoral injection of a dsRNA in mice reduces tumor volume (Pille, J., et al (2005) Mol. Ther. 11:267-274) and can prolong survival of tumor-bearing mice (Kim, W J., et al (2006) Mol. Ther. 14:343-350; Li, S., et al (2007) Mol. Ther. 15:515-523). RNA interference has also shown success with local delivery to the CNS by direct injection (Dorn, G., et al. (2004) Nucleic Acids 32:c49; Tan, P H., et al (2005) Gene Ther. 12:59-66; Makimura, H., et al (2002) BMC Neurosci. 3:18; Shishkina, G T., et al (2004) Neuroscience 129:521-528; Thakker, E R., et al (2004) Proc. Natl. Acad. Sci. U.S.A. 101:17270-17275; Akaneya. Y., et al (2005) J. Neurophysiol. 93:594-602) and to the lungs by intranasal administration (Howard, K A., et al (2006) Mol. Ther. 14:476-484; Zhang, X., et al (2004) J. Biol. Chem. 279:10677-10684; Bitko, V., et al (2005) Nat. Med. 11:50-55). For administering an iRNA systemically for the treatment of a disease, the RNA can be modified or alternatively delivered using a drug delivery system; both methods act to prevent the rapid degradation of the dsRNA by endo- and exo-nucleases in vivo. Modification of the RNA or the pharmaceutical carrier can also permit targeting of the iRNA composition to the target tissue and avoid undesirable off-target effects. iRNA molecules can be modified by chemical conjugation to lipophilic groups such as cholesterol to enhance cellular uptake and prevent degradation. For example, an iRNA directed against ApoB conjugated to a lipophilic cholesterol moiety was injected systemically into mice and resulted in knockdown of apoB mRNA in both the liver and jejunum (Soutschek, J., et al (2004) Nature 432:173-178). Conjugation of an iRNA to an aptamer has been shown to inhibit tumor growth and mediate tumor regression in a mouse model of prostate cancer (McNamara, J O., et al (2006) Nat. Biotechnol. 24:1005-1015). In an alternative embodiment, the iRNA can be delivered using drug delivery systems such as a nanoparticle, a dendrimer, a polymer, liposomes, or a cationic delivery system. Positively charged cationic delivery systems facilitate binding of an iRNA molecule (negatively charged) and also enhance interactions at the negatively charged cell membrane to permit efficient uptake of an iRNA by the cell. Cationic lipids, dendrimers, or polymers can either be bound to an iRNA, or induced to form a vesicle or micelle (see e.g., Kim S H., et al (2008) Journal of Controlled Release 129(2): 107-116) that encases an iRNA. The formation of vesicles or micelles further prevents degradation of the iRNA when administered systemically. Methods for making and administering cationic-iRNA complexes are well within the abilities of one skilled in the art (see e.g., Sorensen, D R., et al (2003) J. Mol. Biol 327:761-766; Verma, U N., et al (2003) Clin. Cancer Res. 9:1291-1300; Arnold, A S et al (2007) J. Hypertens. 25:197-205, which are incorporated herein by reference in their entirety). Some non-limiting examples of drug delivery systems useful for systemic delivery of iRNAs include DOTAP (Sorensen, D R., et al (2003), supra; Verma, U N., et al (2003), supra), Oligofectamine, “solid nucleic acid lipid particles” (Zimmermann, T S., et al (2006) Nature 441:111-114), cardiolipin (Chien, P Y., et al (2005) Cancer Gene Ther. 12:321-328; Pal, A., et al (2005) Int J. Oncol. 26:1087-1091), polyethyleneimine (Bonnet M E., et al (2008) Pharm. Res. August 16 Epub ahead of print; Aigner, A. (2006) J. Biomed. Biotechnol. 71659), Arg-Gly-Asp (RGD) peptides (Liu, S. (2006) Mol. Pharm. 3:472-487), and polyamidoamines (Tomalia, D A., et al (2007) Biochem. Soc. Trans. 35:61-67; Yoo, H., et al (1999) Pharm. Res. 16:1799-1804). In some embodiments, an iRNA forms a complex with cyclodextrin for systemic administration. Methods for administration and pharmaceutical compositions of iRNAs and cyclodextrins can be found in U.S. Pat. No. 7,427,605, which is herein incorporated by reference in its entirety.

A. Vector Encoded iRNAs of the Invention

[0404] iRNA targeting the PCSK9 gene can be expressed from transcription units inserted into DNA or RNA vectors (see, e.g., Couture, A, et al., TIG. (1996), 12:5-10; Skillern, A., et al., International PCT Publication No. WO 00/22113, Conrad, International PCT Publication No. WO 00/22114, and Conrad, U.S. Pat. No. 6,054,299). Expression can be transient (on the order of hours to weeks) or sustained (weeks to months or longer), depending upon the specific construct used and the target tissue or cell type. These transgenes can be introduced as a linear construct, a circular plasmid, or a viral vector, which can be an integrating or non-integrating vector. The transgene can also be constructed to permit it to be inherited as an extrachromosomal plasmid (Gassmann, et al., Proc. Natl. Acad. Sci. USA (1995) 92:1292).

[0405] The individual strand or strands of an iRNA can be transcribed from a promoter on an expression vector. Where two separate strands are to be expressed to generate, for example, a dsRNA, two separate expression vectors can be co-introduced (e.g., by transfection or infection) into a target cell. Alternatively each individual strand of a dsRNA can be transcribed by promoters both of which are located on the same expression plasmid. In one embodiment, a dsRNA is expressed as inverted repeat polynucleotides joined by a linker polynucleotide sequence such that the dsRNA has a stem and loop structure.

[0406] iRNA expression vectors are generally DNA plasmids or viral vectors. Expression vectors compatible with eukaryotic cells, preferably those compatible with vertebrate cells, can be used to produce recombinant constructs for the expression of an iRNA as described herein. Eukaryotic cell expression vectors are well known in the art and are available from a number of commercial sources. Typically, such vectors are provided containing convenient restriction sites for insertion of the desired nucleic acid segment. Delivery of iRNA expressing vectors can be systemic, such as by intravenous or intramuscular administration, by administration to target cells ex-planted from the patient followed by reintroduction into the patient, or by any other means that allows for introduction into a desired target cell.

[0407] iRNA expression plasmids can be transfected into target cells as a complex with cationic lipid carriers (e.g., Oligofectamine) or non-cationic lipid-based carriers (e.g., Transit-TKO™). Multiple lipid transfections for iRNA-mediated knockdowns targeting different regions of a target RNA over a period of a week or more are also contemplated by the invention. Successful introduction of vectors into host cells can be monitored using various known methods. For example, transient transfection can be signaled with a reporter, such as a fluorescent marker, such as Green Fluorescent Protein (GFP). Stable transfection of cells ex vivo can be ensured using markers that provide the transfected cell with resistance to specific environmental factors (e.g., antibiotics and drugs), such as hygromycin B resistance.

[0408] Viral vector systems which can be utilized with the methods and compositions described herein include, but are not limited to, (a) adenovirus vectors; (b) retrovirus vectors, including but not limited to lentiviral vectors, moloney murine leukemia virus, etc.; (c) adeno-associated virus vectors; (d) herpes simplex virus vectors; (e) SV 40 vectors; (f) polyoma virus vectors; (g) papilloma virus vectors; (h) picornavirus vectors; (i) pox virus vectors such as an orthopox, e.g., vaccinia virus vectors or avipox, e.g. canary pox or fowl pox; and (j) a helper-dependent or gutless adenovirus. Replication-defective viruses can also be advantageous. Different vectors will or will not become incorporated into the cells' genome. The constructs can include viral sequences for transfection, if desired. Alternatively, the construct can be incorporated into vectors capable of episomal replication, e.g. EPV and EBV vectors. Constructs for the recombinant expression of an iRNA will generally require regulatory elements, e.g., promoters, enhancers, etc., to ensure the expression of the iRNA in target cells. Other aspects to consider for vectors and constructs are further described below.

[0409] Vectors useful for the delivery of an iRNA will include regulatory elements (promoter, enhancer, etc.) sufficient for expression of the iRNA in the desired target cell or tissue. The regulatory elements can be chosen to provide either constitutive or regulated/inducible expression.

[0410] Expression of the iRNA can be precisely regulated, for example, by using an inducible regulatory sequence that is sensitive to certain physiological regulators, e.g., circulating glucose levels, or hormones (Docherty et al., 1994, FASEB J. 8:20-24). Such inducible expression systems, suitable for the control of dsRNA expression in cells or in mammals include, for example, regulation by ecdysone, by estrogen, progesterone, tetracycline, chemical inducers of dimerization, and isopropyl-beta-D1-thiogalactopyranoside (IPTG). A person skilled in the art would be able to choose the appropriate regulatory/promoter sequence based on the intended use of the iRNA transgene.

[0411] Viral vectors that contain nucleic acid sequences encoding an iRNA can be used. For example, a retroviral vector can be used (see Miller et al., Meth. Enzymol. 217:581-599 (1993)). These retroviral vectors contain the components necessary for the correct packaging of the viral genome and integration into the host cell DNA. The nucleic acid sequences encoding an iRNA are cloned into one or more vectors, which facilitate delivery of the nucleic acid into a patient. More detail about retroviral vectors can be found, for example, in Boesen et al., Biotherapy 6:291-302 (1994), which describes the use of a retroviral vector to deliver the mdr1 gene to hematopoietic stem cells in order to make the stem cells more resistant to chemotherapy. Other references illustrating the use of retroviral vectors in gene therapy are: Clowes et al., J. Clin. Invest. 93:644-651 (1994); Kiem et al., Blood 83:1467-1473 (1994); Salmons and Gunzberg, Human Gene Therapy 4: 129-141 (1993); and Grossman and Wilson, Curr. Opin. in Genetics and Devel. 3:110-114 (1993). Lentiviral vectors contemplated for use include, for example, the HIV based vectors described in U.S. Pat. Nos. 6,143,520; 5,665,557; and 5,981,276, which are herein incorporated by reference.

[0412] Adenoviruses are also contemplated for use in delivery of iRNAs of the invention. Adenoviruses are especially attractive vehicles, e.g., for delivering genes to respiratory epithelia. Adenoviruses naturally infect respiratory epithelia where they cause a mild disease. Other targets for adenovirus-based delivery systems are liver, the central nervous system, endothelial cells, and muscle. Adenoviruses have the advantage of being capable of infecting non-dividing cells. Kozarsky and Wilson, Current Opinion in Genetics and Development 3:499-503 (1993) present a review of adenovirus-based gene therapy. Bout et al., Human Gene Therapy 5:3-10 (1994) demonstrated the use of adenovirus vectors to transfer genes to the respiratory epithelia of rhesus monkeys. Other instances of the use of adenoviruses in gene therapy can be found in Rosenfeld et al., Science 252:431-434 (1991); Rosenfeld et al., Cell 68:143-155 (1992); Mastrangeli et al., J. Clin. Invest. 91:225-234 (1993); PCT Publication WO94/12649; and Wang, et al., Gene Therapy 2:775-783 (1995). A suitable AV vector for expressing an iRNA featured in the invention, a method for constructing the recombinant AV vector, and a method for delivering the vector into target cells, are described in Xia H et al. (2002), Nat. Biotech. 20: 1006-1010.

[0413] Adeno-associated virus (AAV) vectors may also be used to delivery an iRNA of the invention (Walsh et al., Proc. Soc. Exp. Biol. Med. 204:289-300 (1993); U.S. Pat. No. 5,436,146). In one embodiment, the iRNA can be expressed as two separate, complementary single-stranded RNA molecules from a recombinant AAV vector having, for example, either the U6 or H1 RNA promoters, or the cytomegalovirus (CMV) promoter. Suitable AAV vectors for expressing the dsRNA featured in the invention, methods for constructing the recombinant AV vector, and methods for delivering the vectors into target cells are described in Samulski R et al. (1987), J. Virol. 61: 3096-3101; Fisher K J et al. (1996), J. Virol, 70: 520-532; Samulski R et al. (1989), J. Virol. 63: 3822-3826; U.S. Pat. Nos. 5,252,479; 5,139,941; International Patent Application No. WO 94/13788; and International Patent Application No. WO 93/24641, the entire disclosures of which are herein incorporated by reference.

[0414] Another viral vector sui for delivery of an iRNA of the invention is a pox virus such as a vaccinia virus, for example an attenuated vaccinia such as Modified Virus Ankara (MVA) or NYVAC, an avipox such as fowl pox or canary pox.

[0415] The tropism of viral vectors can be modified by pseudotyping the vectors with envelope proteins or other surface antigens from other viruses, or by substituting different viral capsid proteins, as appropriate. For example, lentiviral vectors can be pseudotyped with surface proteins from vesicular stomatitis virus (VSV), rabies, Ebola, Mokola, and the like. AAV vectors can be made to target different cells by engineering the vectors to express different capsid protein serotypes; see, e.g., Rabinowitz J E et al. (2002), J Virol 76:791-801, the entire disclosure of which is herein incorporated by reference.

[0416] The pharmaceutical preparation of a vector can include the vector in an acceptable diluent, or can include a slow release matrix in which the gene delivery vehicle is imbedded. Alternatively, where the complete gene delivery vector can be produced intact from recombinant cells, e.g., retroviral vectors, the pharmaceutical preparation can include one or more cells which produce the gene delivery system.

### V. PHARMACEUTICAL COMPOSITIONS OF THE INVENTION

[0417] The present invention also includes pharmaceutical compositions and formulations which include the iRNAs of the invention. In one embodiment, provided herein are pharmaceutical compositions containing an iRNA, as described herein, and a pharmaceutically acceptable carrier.

[0418] The phrase “pharmaceutically acceptable” is employed herein to refer to those compounds, materials, compositions, and/or dosage forms which are, within the scope of sound medical judgment, suitable for use in contact with the tissues of human subjects and animal subjects without excessive toxicity, irritation, allergic response, or other problem or complication, commensurate with a reasonable benefit/risk ratio.

[0419] The phrase “pharmaceutically-acceptable carrier” as used herein means a pharmaceutically-acceptable material, composition or vehicle, such as a liquid or solid filler, diluent, excipient, manufacturing aid (e.g., lubricant, talc magnesium, calcium or zinc stearate, or steric acid), or solvent encapsulating material, involved in carrying or transporting the subject compound from one organ, or portion of the body, to another organ, or portion of the body. Each carrier must be “acceptable” in the sense of being compatible with the other ingredients of the formulation and not injurious to the subject being treated. Some examples of materials which can serve as pharmaceutically-acceptable carriers include: (1) sugars, such as lactose, glucose and sucrose; (2) starches, such as corn starch and potato starch; (3) cellulose, and its derivatives, such as sodium carboxymethyl cellulose, ethyl cellulose and cellulose acetate; (4) powdered tragacanth; (5) malt; (6) gelatin; (7) lubricating agents, such as magnesium state, sodium lauryl sulfate and talc; (8) excipients, such as cocoa butter and suppository waxes; (9) oils, such as peanut oil, cottonseed oil, safflower oil, sesame oil, olive oil, corn oil and soybean oil; (10) glycols, such as propylene glycol; (11) polyols, such as glycerin, sorbitol, mannitol and polyethylene glycol; (12) esters, such as ethyl oleate and ethyl laurate; (13) agar; (14) buffering agents, such as magnesium hydroxide and aluminum hydroxide; (15) alginic acid; (16) pyrogen-free water; (17) isotonic saline; (18) Ringer's solution; (19) ethyl alcohol; (20) pH buffered solutions; (21) polyesters, polycarbonates and/or polyanhydrides; (22) bulking agents, such as polypeptides and amino acids (23) serum component, such as serum albumin, HDL and LDL; and (22) other non-toxic compatible substances employed in pharmaceutical formulations.

[0420] The pharmaceutical compositions containing the iRNA are useful for treating a disease or disorder associated with the expression or activity of a PCSK9, e.g. a disease or disorder that would benefit from reduction in PCSK9 expression. Such pharmaceutical compositions are formulated based on the mode of delivery. One example is compositions that are formulated for systemic administration via parenteral delivery, e.g., by subcutaneous (SC), intramuscular (IM), or intravenous (IV) delivery. Another example is compositions that are formulated for direct delivery into the brain parenchyma, e.g., by infusion into the brain, such as by continuous pump infusion. The pharmaceutical compositions of the invention may be administered in dosages sufficient to inhibit expression of a PCSK9 gene.

[0421] Preferably, in the methods of the invention an iRNA agent is administered to a subject as a fixed dose. In one particular embodiment, a fixed dose of an iRNA agent of the invention is based on a predetermined weight or age.

[0422] In some embodiments, the RNAi agent is administered as a fixed dose of between about 200 mg to about 850 mg, between about 200 mg to about 500 mg, between about 200 mg to about 400 mg, between about 200 mg to about 300 mg, between about 100 mg to about 800 mg, between about 100 mg to about 750 mg, between about 100 mg to about 700 mg, between about 100 mg to about 650 mg, between about 100 mg to about 600 mg, between about 100 mg to about 550 mg, between about 100 mg to about 500 mg, between about 200 mg to about 850 mg, between about 200 mg to about 800 mg, between about 200 mg to about 750 mg, between about 200 mg to about 700 mg, between about 200 mg to about 650 mg, between about 200 mg to about 600 mg, between about 200 mg to about 550 mg, between about 200 mg to about 500 mg, between about 300 mg to about 850 mg, between about 300 mg to about 800 mg, between about 300 mg to about 750 mg, between about 300 mg to about 700 mg, between about 300 mg to about 650 mg, between about 300 mg to about 600 mg, between about 300 mg to about 550 mg, between about 300 mg to about 500 mg, between about 400 mg to about 850 mg, between about 400 mg to about 800 mg, between about 400 mg to about 750 mg, between about 400 mg to about 700 mg, between about 400 mg to about 650 mg, between about 400 mg to about 600 mg, between about 400 mg to about 550 mg, or between about 400 mg to about 500 mg.

[0423] In some embodiments, the RNAi agent is administered as a fixed dose of about about 100 mg, about 125 mg, about 150 mg, about 175 mg. 200 mg, about 225 mg, about 250 mg, about 275 mg, about 300 mg, about 325 mg, about 350 mg, about 375 mg, about 400 mg, about 425 mg, about 450 mg, about 475 mg, about 500 mg, about 525 mg, about 550 mg, about 575 mg, about 600 mg, about 625 mg, about 650 mg, about 675 mg, about 700 mg, about 725 mg, about 750 mg, about 775 mg, about 800 mg, about 825 mg, or about 850 mg.

[0424] In some embodiments, subjects are administered, e.g., subcutaneously or intramuscularly, multiple doses of a therapeutic amount of iRNA.

[0425] The iRNA may be formulated in a pharmaceutical composition at a suitable concentration such that a suitable volume of the composition is administered to the subject, such as about 1.0 mls, 1.1 mls, 1.2 mls, 1.3 mls, 1.4 mls, 1.5 mls, 1.6 mls, 1.7 mls, 1.8 mls, 1.9 mls, or about 2.0 mls of a pharmaceutical composition. For example, in one embodiment, an iRNA agent of the invention is formulated in a suitable pharmaceutical formulation at about 200 mg/ml such that administration of about 1.5 mls of the formulation to a subject provides a 300 mg fixed dose of the agent.

[0426] As described herein, a single dose of the iRNA agents or pharmaceutical compositions comprising such agents can be long lasting, such that subsequent doses are administered at not more than 1 week, 2 weeks, 1 month, 2 month, 3 month, 4 month, 5 month, or 6 month intervals.

[0427] In some embodiments, subjects are administered, e.g., subcutaneously or intramuscularly, a repeat dose of a therapeutic amount of iRNA. A repeat-dose regimine may include administration of a therapeutic amount of iRNA on a regular basis, such as once a month, once every two months, once a quarter, once every four months, once every five months, or biannually. In some embodiments of the invention, a single dose of the pharmaceutical compositions of the invention is administered once per quarter (qQ). In other embodiments of the invention, a single dose of the pharmaceutical compositions of the invention is administered bi-annually (i.e., every six months). Administration can be repeated, e.g., once every quarter for 6 months, one year, two years or longer, e.g., administered chronically.

[0428] In some embodiments, the RNAi agent is administered in a dosing regimen that includes a loading phase followed by a maintenance phase.

[0429] The loading phase may include a single administration of the RNAi agent during the first week, a single administration of the RNAi agent during the first two weeks, or a single administration of the RNAi agent during the first month at a fixed dose of, for example, about 100 mg to about 700 mg, about 150 mg to about 700 mg, about 200 mg to about 700 mg, about 250 mg to about 700 mg, about 300 mg to about 700 mg, about 350 mg to about 700 mg, about 400 mg to about 700 mg, about 450 mg to about 700 mg, about 500 mg to about 700 mg, about 550 mg to about 700 mg, about 600 to about 700 mg, about 650 to about 700 mg, about 100 mg to about 650 mg, about 150 mg to about 650 mg, about 200 mg to about 650 mg, about 250 mg to about 650 mg, about 300 mg to about 650 mg, about 350 mg to about 650 mg, about 400 mg to about 650 mg, about 450 mg to about 650 mg, about 500 mg to about 650 mg, about 550 mg to about 650 mg, about 600 to about 650 mg, about 100 mg to about 600 mg, about 150 mg to about 600 mg, about 200 mg to about 600 mg, about 250 mg to about 600 mg, about 300 mg to about 600 mg, about 350 mg to about 600 mg, about 400 mg to about 600 mg, about 450 mg to about 600 mg, about 500 mg to about 600 mg, about 550 mg to about 600 mg, about 100 mg to about 550 mg, about 150 mg to about 550 mg, about 200 mg to about 550 mg, about 250 mg to about 550 mg, about 300 mg to about 550 mg, about 350 mg to about 550 mg, about 400 mg to about 550 mg, about 450 mg to about 550 mg, about 500 mg to about 550 mg, about 100 mg to about 500 mg, about 150 mg to about 500 mg, about 200 mg to about 500 mg, about 250 mg to about 500 mg, about 300 mg to about 500 mg, about 350 mg to about 500 mg, about 400 mg to about 500 mg, or about 450 mg to about 500 mg, e.g., a fixed dose of about 100 mg, about 125 mg, about 150 mg, about 175 mg. 200 mg, about 225 mg, about 250 mg, about 275 mg, about 300 mg, about 325 mg, about 350 mg, about 375 mg, about 400 mg, about 425 mg, about 450 mg, about 475 mg, about 500 mg, about 525 mg, about 550 mg, about 575 mg, about 600 mg, about 625 mg, about 650 mg, about 675 mg, or about 700 mg. Values and ranges intermediate to the foregoing recited values are also intended to be part of this invention.

[0430] The maintenance phase may include administration of a dose of the RNAi agent to the subject once a month, once every two months, once every three months, once every four months, once every five months, or once every six months. In one particular embodiment, the maintenance dose is administered to the subject once a month.

[0431] The maintenance dose or doses can be the same or lower than the initial dose, e.g., one-half of the initial dose. For example, a maintenance dose may be about 25 mg to about 100 mg administered to the subject monthly, for example about 25 mg to about 75 mg, about 25 mg to about 50 mg, or about 50 mg to about 75 mg. e.g., about 25 mg, about 30 mg, about 35 mg, about 40 mg, about 45 mg, about 50 mg, about 55 mg, about 60 mg, about 65 mg, about 70 mg, about 75 mg, about 80 mg, about 85 mg, about 90 mg, about 95 mg, or about 100 mg. Values and ranges intermediate to the foregoing recited values are also intended to be part of this invention.

[0432] The pharmaceutical composition can be administered by intravenous infusion over a period of time, such as over a 5, 6, 7, 8, 9, 10, 11, 12, 13, 14, 15, 16, 17, 18, 19, 20, and 21, 22, 23, 24, or about a 25 minute period. The administration may be repeated, for example, on a regular basis, such as weekly, biweekly (i.e., every two weeks) for one month, two months, three months, four months or longer. After an initial treatment regimen, the treatments can be administered on a less frequent basis. For example, after administration weekly or biweekly for three months, administration can be repeated once per month, for six months or a year or longer.

[0433] The skilled artisan will appreciate that certain factors can influence the dosage and timing required to effectively treat a subject, including but not limited to the severity of the disease or disorder, previous treatments, the general health and/or age of the subject, and other diseases present. Moreover, treatment of a subject with a therapeutically effective amount of a composition can include a single treatment or a series of treatments. Estimates of effective dosages and in vivo half-lives for the individual iRNAs encompassed by the invention can be made using conventional methodologies or on the basis of in vivo testing using an appropriate animal model, as described elsewhere herein.

[0434] The pharmaceutical compositions of the present invention can be administered in a number of ways depending upon whether local or systemic treatment is desired and upon the area to be treated. Administration can be topical (e.g., by a transdermal patch), pulmonary, e.g., by inhalation or insufflation of powders or aerosols, including by nebulizer; intratracheal, intranasal, epidermal and transdermal, oral or parenteral. Parenteral administration includes intravenous, intraarterial, subcutaneous, intraperitoneal or intramuscular injection or infusion; subdermal, e.g., via an implanted device; or intracranial, e.g., by intraparenchymal, intrathecal or intraventricular, administration.

[0435] The iRNA can be delivered in a manner to target a particular tissue, such as the liver (e.g., the hepatocytes of the liver).

[0436] Pharmaceutical compositions and formulations for topical administration can include transdermal patches, ointments, lotions, creams, gels, drops, suppositories, sprays, liquids and powders. Conventional pharmaceutical carriers, aqueous, powder or oily bases, thickeners and the like can be necessary or desirable. Coated condoms, gloves and the like can also be useful. Suitable topical formulations include those in which the iRNAs featured in the invention are in admixture with a topical delivery agent such as lipids, liposomes, fatty acids, fatty acid esters, steroids, chelating agents and surfactants. Suitable lipids and liposomes include neutral (e.g., diolcoylphosphatidyl DOPE ethanolamine, dimyristoylphosphatidyl choline DMPC, distearolyphosphatidyl choline) negative (e.g., dimyristoylphosphatidyl glycerol DMPG) and cationic (e.g., diolcoyltetramethylaminopropyl DOTAP and diolcoylphosphatidyl ethanolamine DOTMA). iRNAs featured in the invention can be encapsulated within liposomes or can form complexes thereto, in particular to cationic liposomes. Alternatively, iRNAs can be complexed to lipids, in particular to cationic lipids. Suitable fatty acids and esters include but are not limited to arachidonic acid, oleic acid, eicosanoic acid, lauric acid, caprylic acid, capric acid, myristic acid, palmitic acid, stearic acid, linoleic acid, linolenic acid, dicaprate, tricaprate, monoolein, dilaurin, glyceryl 1-monocaprate, 1-dodecylazacycloheptan-2-one, an acylcarnitine, an acylcholine, or a C₁₋₂₀ alkyl ester (e.g., isopropylmyristate IPM), monoglyceride, diglyceride or pharmaceutically acceptable salt thereof). Topical formulations are described in detail in U.S. Pat. No. 6,747,014, which is incorporated herein by reference.

[0437] Compositions and formulations for oral administration include powders or granules, microparticulates, nanoparticulates, suspensions or solutions in water or non-aqueous media, capsules, gel capsules, sachets, tablets or minitablets. Thickeners, flavoring agents, diluents, emulsifiers, dispersing aids or binders can be desirable. In some embodiments, oral formulations are those in which dsRNAs featured in the invention are administered in conjunction with one or more penetration enhancer surfactants and chelators. Suitable surfactants include fatty acids and/or esters or salts thereof, bile acids and/or salts thereof. Suitable bile acids/salts include chenodeoxycholic acid (CDCA) and ursodeoxychenodeoxycholic acid (UDCA), cholic acid, dehydrocholic acid, deoxycholic acid, glucholic acid, glycholic acid, glycodeoxycholic acid, taurocholic acid, taurodeoxycholic acid, sodium tauro-24,25-dihydro-fusidate and sodium glycodihydrofusidate. Suitable fatty acids include arachidonic acid, undecanoic acid, oleic acid, lauric acid, caprylic acid, capric acid, myristic acid, palmitic acid, stearic acid, linoleic acid, linolenic acid, dicaprate, tricaprate, monoolein, dilaurin, glyceryl 1-monocaprate, 1-dodecylazacycloheptan-2-one, an acylcarnitine, an acylcholine, or a monoglyceride, a diglyceride or a pharmaceutically acceptable salt thereof (e.g., sodium). In some embodiments, combinations of penetration enhancers are used, for example, fatty acids/salts in combination with bile acids/salts. One exemplary combination is the sodium salt of lauric acid, capric acid and UDCA. Further penetration enhancers include polyoxyethylene-9-lauryl ether, polyoxyethylene-20-cetyl ether. DsRNAs featured in the invention can be delivered orally, in granular form including sprayed dried particles, or complexed to form micro or nanoparticles. DsRNA complexing agents include poly-amino acids; polyimines; polyacrylates; polyalkylacrylates, polyoxethanes, polyalkylcyanoacrylates; cationized gelatins, albumins, starches, acrylates, polyethyleneglycols (PEG) and starches; polyalkylcyanoacrylates; DEAE-derivatized polyimines, pollulans, celluloses and starches. Suitable complexing agents include chitosan, N-trimethylchitosan, poly-L-lysine, polyhistidine, polyornithine, polyspermines, protamine, polyvinylpyridine, polythiodicthylaminomethylethylene P(TDAE), polyaminostyrene (e.g., p-amino), poly(methylcyanoacrylate), poly(ethylcyanoacrylate), poly(butylcyanoacrylate), poly(isobutylcyanoacrylate), poly(isohexylcynaoacrylate), DEAE-methacrylate, DEAE-hexylacrylate, DEAE-acrylamide, DEAE-albumin and DEAE-dextran, polymethylacrylate, polyhexylacrylate, poly(D,L-lactic acid), poly(DL-lactic-co-glycolic acid (PLGA), alginate, and polyethyleneglycol (PEG). Oral formulations for dsRNAs and their preparation are described in detail in U.S. Pat. No. 6,887,906, US Publn. No. 20030027780, and U.S. Pat. No. 6,747,014, each of which is incorporated herein by reference.

[0438] Compositions and formulations for parenteral, intraparenchymal (into the brain), intrathecal, intraventricular or intrahepatic administration can include sterile aqueous solutions which can also contain buffers, diluents and other suitable additives such as, but not limited to, penetration enhancers, carrier compounds and other pharmaceutically acceptable carriers or excipients.

[0439] Pharmaceutical compositions of the present invention include, but are not limited to, solutions, emulsions, and liposome-containing formulations. These compositions can be generated from a variety of components that include, but are not limited to, preformed liquids, self-emulsifying solids and self-emulsifying semisolids. Particularly preferred are formulations that target the liver when treating hepatic disorders such as hepatic carcinoma.

[0440] The pharmaceutical formulations of the present invention, which can conveniently be presented in unit dosage form, can be prepared according to conventional techniques well known in the pharmaceutical industry. Such techniques include the step of bringing into association the active ingredients with the pharmaceutical carrier(s) or excipient(s). In general, the formulations are prepared by uniformly and intimately bringing into association the active ingredients with liquid carriers or finely divided solid carriers or both, and then, if necessary, shaping the product.

[0441] The compositions of the present invention can be formulated into any of many possible dosage forms such as, but not limited to, tablets, capsules, gel capsules, liquid syrups, soft gels, suppositories, and enemas. The compositions of the present invention can also be formulated as suspensions in aqueous, non-aqueous or mixed media. Aqueous suspensions can further contain substances which increase the viscosity of the suspension including, for example, sodium carboxymethylcellulose, sorbitol and/or dextran. The suspension can also contain stabilizers.

### A. Additional Formulations

i. Emulsions

[0442] The compositions of the present invention can be prepared and formulated as emulsions. Emulsions are typically heterogeneous systems of one liquid dispersed in another in the form of droplets usually exceeding 0.1 μm in diameter (see e.g., Ansel's Pharmaceutical Dosage Forms and Drug Delivery Systems, Allen, LV., Popovich NG., and Ansel HC., 2004, Lippincott Williams & Wilkins (8th ed.), New York, NY; Idson, in Pharmaceutical Dosage Forms, Lieberman, Rieger and Banker (Eds.), 1988 Marchcel Dekker, Inc., New York, N.Y., volume 1, p. 199; Rosoff, in Pharmaceutical Dosage Forms, Lieberman, Rieger and Banker (Eds.), 1988 Marchcel Dekker, Inc., New York, N.Y., Volume 1, p. 245; Block in Pharmaceutical Dosage Forms, Lieberman, Rieger and Banker (Eds.), 1988 Marchcel Dekker, Inc., New York, N.Y., volume 2, p. 335; Higuchi et al., in Remington's Pharmaceutical Sciences, Mack Publishing Co., Easton, Pa., 1985, p. 301). Emulsions are often biphasic systems comprising two immiscible liquid phases intimately mixed and dispersed with each other. In general, emulsions can be of either the water-in-oil (w/o) or the oil-in-water (o/w) variety. When an aqueous phase is finely divided into and dispersed as minute droplets into a bulk oily phase, the resulting composition is called a water-in-oil (w/o) emulsion. Alternatively, when an oily phase is finely divided into and dispersed as minute droplets into a bulk aqueous phase, the resulting composition is called an oil-in-water (o/w) emulsion. Emulsions can contain additional components in addition to the dispersed phases, and the active drug which can be present as a solution in either the aqueous phase, oily phase or itself as a separate phase. Pharmaceutical excipients such as emulsifiers, stabilizers, dyes, and anti-oxidants can also be present in emulsions as needed. Pharmaceutical emulsions can also be multiple emulsions that are comprised of more than two phases such as, for example, in the case of oil-in-water-in-oil (o/w/o) and water-in-oil-in-water (w/o/w) emulsions. Such complex formulations often provide certain advantages that simple binary emulsions do not. Multiple emulsions in which individual oil droplets of an o/w emulsion enclose small water droplets constitute a w/o/w emulsion. Likewise a system of oil droplets enclosed in globules of water stabilized in an oily continuous phase provides an o/w/o emulsion.

[0443] Emulsions are characterized by little or no thermodynamic stability. Often, the dispersed or discontinuous phase of the emulsion is well dispersed into the external or continuous phase and maintained in this form through the means of emulsifiers or the viscosity of the formulation. Either of the phases of the emulsion can be a semisolid or a solid, as is the case of emulsion-style ointment bases and creams. Other means of stabilizing emulsions entail the use of emulsifiers that can be incorporated into either phase of the emulsion. Emulsifiers can broadly be classified into four categories: synthetic surfactants, naturally occurring emulsifiers, absorption bases, and finely dispersed solids (see e.g., Ansel's Pharmaceutical Dosage Forms and Drug Delivery Systems, Allen, LV., Popovich NG., and Ansel HC., 2004, Lippincott Williams & Wilkins (8th ed.), New York, NY; Idson, in Pharmaceutical Dosage Forms, Lieberman, Rieger and Banker (Eds.), 1988 Marchcel Dekker, Inc., New York, N.Y., volume 1, p. 199).

[0444] Synthetic surfactants, also known as surface active agents, have found wide applicability in the formulation of emulsions and have been reviewed in the literature (see e.g., Ansel's Pharmaceutical Dosage Forms and Drug Delivery Systems, Allen, LV., Popovich NG., and Ansel HC., 2004, Lippincott Williams & Wilkins (8th ed.), New York, NY; Rieger, in Pharmaceutical Dosage Forms, Lieberman, Rieger and Banker (Eds.), 1988 Marchcel Dekker, Inc., New York, N.Y., volume 1, p. 285; Idson, in Pharmaceutical Dosage Forms, Lieberman, Rieger and Banker (Eds.), Marcel Dekker, Inc., New York, N.Y., 1988, volume 1, p. 199). Surfactants are typically amphiphilic and comprise a hydrophilic and a hydrophobic portion. The ratio of the hydrophilic to the hydrophobic nature of the surfactant has been termed the hydrophile/lipophile balance (HLB) and is a valuable tool in categorizing and selecting surfactants in the preparation of formulations. Surfactants can be classified into different classes based on the nature of the hydrophilic group: nonionic, anionic, cationic and amphoteric (see e.g., Ansel's Pharmaceutical Dosage Forms and Drug Delivery Systems, Allen, L V., Popovich N G., and Ansel H C., 2004, Lippincott Williams & Wilkins (8th ed.), New York, NY Rieger, in Pharmaceutical Dosage Forms, Lieberman, Rieger and Banker (Eds.), 1988 Marchcel Dekker, Inc., New York, N.Y., volume 1, p. 285).

[0445] Naturally occurring emulsifiers used in emulsion formulations include lanolin, beeswax, phosphatides, lecithin and acacia. Absorption bases possess hydrophilic properties such that they can soak up water to form w/o emulsions yet retain their semisolid consistencies, such as anhydrous lanolin and hydrophilic petrolatum. Finely divided solids have also been used as good emulsifiers especially in combination with surfactants and in viscous preparations. These include polar inorganic solids, such as heavy metal hydroxides, nonswelling clays such as bentonite, attapulgite, hectorite, kaolin, montmorillonite, colloidal aluminum silicate and colloidal magnesium aluminum silicate, pigments and nonpolar solids such as carbon or glyceryl tristearate.

[0446] A large variety of non-emulsifying materials are also included in emulsion formulations and contribute to the properties of emulsions. These include fats, oils, waxes, fatty acids, fatty alcohols, fatty esters, humectants, hydrophilic colloids, preservatives and antioxidants (Block, in Pharmaceutical Dosage Forms, Lieberman, Rieger and Banker (Eds.), 1988 Marchcel Dekker, Inc., New York, N.Y., volume 1, p. 335; Idson, in Pharmaceutical Dosage Forms, Lieberman, Rieger and Banker (Eds.), 1988 Marchcel Dekker, Inc., New York, N.Y., volume 1, p. 199).

[0447] Hydrophilic colloids or hydrocolloids include naturally occurring gums and synthetic polymers such as polysaccharides (for example, acacia, agar, alginic acid, carrageenan, guar gum, karaya gum, and tragacanth), cellulose derivatives (for example, carboxymethylcellulose and carboxypropylcellulose), and synthetic polymers (for example, carbomers, cellulose ethers, and carboxyvinyl polymers). These disperse or swell in water to form colloidal solutions that stabilize emulsions by forming strong interfacial films around the dispersed-phase droplets and by increasing the viscosity of the external phase.

[0448] Since emulsions often contain a number of ingredients such as carbohydrates, proteins, sterols and phosphatides that can readily support the growth of microbes, these formulations often incorporate preservatives. Commonly used preservatives included in emulsion formulations include methyl paraben, propyl paraben, quaternary ammonium salts, benzalkonium chloride, esters of p-hydroxybenzoic acid, and boric acid. Antioxidants are also commonly added to emulsion formulations to prevent deterioration of the formulation. Antioxidants used can be free radical scavengers such as tocopherols, alkyl gallates, butylated hydroxyanisole, butylated hydroxytoluene, or reducing agents such as ascorbic acid and sodium metabisulfite, and antioxidant synergists such as citric acid, tartaric acid, and lecithin.

[0449] The application of emulsion formulations via dermatological, oral and parenteral routes and methods for their manufacture have been reviewed in the literature (see e.g., Ansel's Pharmaceutical Dosage Forms and Drug Delivery Systems, Allen, LV., Popovich NG., and Ansel HC., 2004, Lippincott Williams & Wilkins (8th ed.), New York, NY; Idson, in Pharmaceutical Dosage Forms, Lieberman, Rieger and Banker (Eds.), 1988 Marchcel Dekker, Inc., New York, N.Y., volume 1, p. 199). Emulsion formulations for oral delivery have been very widely used because of case of formulation, as well as efficacy from an absorption and bioavailability standpoint (see e.g., Ansel's Pharmaceutical Dosage Forms and Drug Delivery Systems, Allen, LV., Popovich NG., and Ansel HC., 2004, Lippincott Williams & Wilkins (8th cd.), New York, NY; Rosoff, in Pharmaceutical Dosage Forms, Lieberman, Rieger and Banker (Eds.), 1988 Marchcel Dekker, Inc., New York, N.Y., volume 1, p. 245; Idson, in Pharmaceutical Dosage Forms, Lieberman, Rieger and Banker (Eds.), 1988 Marchcel Dekker, Inc., New York, N.Y., volume 1, p. 199). Mineral-oil base laxatives, oil-soluble vitamins and high fat nutritive preparations are among the materials that have commonly been administered orally as o/w emulsions.

ii. Microemulsions

[0450] In one embodiment of the present invention, the compositions of iRNAs and nucleic acids are formulated as microemulsions. A microemulsion can be defined as a system of water, oil and amphiphile which is a single optically isotropic and thermodynamically stable liquid solution (see e.g., Ansel's Pharmaceutical Dosage Forms and Drug Delivery Systems, Allen, L V., Popovich N G., and Ansel H C., 2004, Lippincott Williams & Wilkins (8th ed.), New York, NY; Rosoff, in Pharmaceutical Dosage Forms, Lieberman, Rieger and Banker (Eds.), 1988 Marchcel Dekker, Inc., New York, N.Y., volume 1, p. 245). Typically microemulsions are systems that are prepared by first dispersing an oil in an aqueous surfactant solution and then adding a sufficient amount of a fourth component, generally an intermediate chain-length alcohol to form a transparent system. Therefore, microemulsions have also been described as thermodynamically stable, isotropically clear dispersions of two immiscible liquids that are stabilized by interfacial films of surface-active molecules (Leung and Shah, in: Controlled Release of Drugs: Polymers and Aggregate Systems, Rosoff, M., Ed., 1989, VCH Publishers, New York, pages 185-215). Microemulsions commonly are prepared via a combination of three to five components that include oil, water, surfactant, cosurfactant and electrolyte. Whether the microemulsion is of the water-in-oil (w/o) or an oil-in-water (o/w) type is dependent on the properties of the oil and surfactant used and on the structure and geometric packing of the polar heads and hydrocarbon tails of the surfactant molecules (Schott, in Remington's Pharmaceutical Sciences, Mack Publishing Co., Easton, Pa., 1985, p. 271).

[0451] The phenomenological approach utilizing phase diagrams has been extensively studied and has yielded a comprehensive knowledge, to one skilled in the art, of how to formulate microemulsions (see e.g., Ansel's Pharmaceutical Dosage Forms and Drug Delivery Systems, Allen, LV., Popovich NG., and Ansel HC., 2004, Lippincott Williams & Wilkins (8th ed.), New York, NY; Rosoff, in Pharmaceutical Dosage Forms, Lieberman, Rieger and Banker (Eds.), 1988 Marchcel Dekker, Inc., New York, N.Y., volume 1, p. 245; Block, in Pharmaceutical Dosage Forms, Lieberman, Rieger and Banker (Eds.), 1988 Marchcel Dekker, Inc., New York, N.Y., volume 1, p. 335). Compared to conventional emulsions, microemulsions offer the advantage of solubilizing water-insoluble drugs in a formulation of thermodynamically stable droplets that are formed spontaneously.

[0452] Surfactants used in the preparation of microemulsions include, but are not limited to, ionic surfactants, non-ionic surfactants, Brij 96, polyoxyethylene oleyl ethers, polyglycerol fatty acid esters, tetraglycerol monolaurate (ML310), tetraglycerol monooleate (MO310), hexaglycerol monooleate (PO310), hexaglycerol pentaoleate (PO500), decaglycerol monocaprate (MCA750), decaglycerol monooleate (MO750), decaglycerol sequioleate (SO750), decaglycerol decaoleate (DAO750), alone or in combination with cosurfactants. The cosurfactant, usually a short-chain alcohol such as ethanol, 1-propanol, and 1-butanol, serves to increase the interfacial fluidity by penetrating into the surfactant film and consequently creating a disordered film because of the void space generated among surfactant molecules. Microemulsions can, however, be prepared without the use of cosurfactants and alcohol-free self-emulsifying microemulsion systems are known in the art. The aqueous phase can typically be, but is not limited to, water, an aqueous solution of the drug, glycerol, PEG300, PEG400, polyglycerols, propylene glycols, and derivatives of ethylene glycol. The oil phase can include, but is not limited to, materials such as Captex 300, Captex 355, Capmul MCM, fatty acid esters, medium chain (C8-C12) mono, di, and tri-glycerides, polyoxyethylated glyceryl fatty acid esters, fatty alcohols, polyglycolized glycerides, saturated polyglycolized C8-C10 glycerides, vegetable oils and silicone oil.

[0453] Microemulsions are particularly of interest from the standpoint of drug solubilization and the enhanced absorption of drugs. Lipid based microemulsions (both o/w and w/o) have been proposed to enhance the oral bioavailability of drugs, including peptides (see e.g., U.S. Pat. Nos. 6,191,105; 7,063,860; 7,070,802; 7,157,099; Constantinides et al., Pharmaceutical Research, 1994, 11, 1385-1390; Ritschel, Meth. Find. Exp. Clin. Pharmacol., 1993, 13, 205). Microemulsions afford advantages of improved drug solubilization, protection of drug from enzymatic hydrolysis, possible enhancement of drug absorption due to surfactant-induced alterations in membrane fluidity and permeability, case of preparation, case of oral administration over solid dosage forms, improved clinical potency, and decreased toxicity (see e.g., U.S. Pat. Nos. 6,191,105; 7,063,860; 7,070,802; 7,157,099; Constantinides et al., Pharmaceutical Research, 1994, 11, 1385; Ho et al., J. Pharm. Sci., 1996, 85, 138-143). Often microemulsions can form spontaneously when their components are brought together at ambient temperature. This can be particularly advantageous when formulating thermolabile drugs, peptides or iRNAs. Microemulsions have also been effective in the transdermal delivery of active components in both cosmetic and pharmaceutical applications. It is expected that the microemulsion compositions and formulations of the present invention will facilitate the increased systemic absorption of iRNAs and nucleic acids from the gastrointestinal tract, as well as improve the local cellular uptake of iRNAs and nucleic acids.

[0454] Microemulsions of the present invention can also contain additional components and additives such as sorbitan monostearate (Grill 3), Labrasol, and penetration enhancers to improve the properties of the formulation and to enhance the absorption of the iRNAs and nucleic acids of the present invention. Penetration enhancers used in the microemulsions of the present invention can be classified as belonging to one of five broad categories—surfactants, fatty acids, bile salts, chelating agents, and non-chelating non-surfactants (Lee et al., Critical Reviews in Therapeutic Drug Carrier Systems, 1991, p. 92). Each of these classes has been discussed above.

iii. Microparticles

[0455] an RNAi agent of the invention may be incorporated into a particle, e.g., a microparticle. Microparticles can be produced by spray-drying, but may also be produced by other methods including lyophilization, evaporation, fluid bed drying, vacuum drying, or a combination of these techniques.

iv. Penetration Enhancers

[0456] In one embodiment, the present invention employs various penetration enhancers to effect the efficient delivery of nucleic acids, particularly iRNAs, to the skin of animals. Most drugs are present in solution in both ionized and nonionized forms. However, usually only lipid soluble or lipophilic drugs readily cross cell membranes. It has been discovered that even non-lipophilic drugs can cross cell membranes if the membrane to be crossed is treated with a penetration enhancer. In addition to aiding the diffusion of non-lipophilic drugs across cell membranes, penetration enhancers also enhance the permeability of lipophilic drugs.

[0457] Penetration enhancers can be classified as belonging to one of five broad categories, i.e., surfactants, fatty acids, bile salts, chelating agents, and non-chelating non-surfactants (see e.g., Malmsten, M. Surfactants and polymers in drug delivery, Informa Health Care, New York, NY, 2002; Lee et al., Critical Reviews in Therapeutic Drug Carrier Systems, 1991, p.92). Each of the above mentioned classes of penetration enhancers are described below in greater detail.

[0458] Surfactants (or “surface-active agents”) are chemical entities which, when dissolved in an aqueous solution, reduce the surface tension of the solution or the interfacial tension between the aqueous solution and another liquid, with the result that absorption of iRNAs through the mucosa is enhanced. In addition to bile salts and fatty acids, these penetration enhancers include, for example, sodium lauryl sulfate, polyoxyethylene-9-lauryl ether and polyoxyethylene-20-cetyl ether) (see e.g., Malmsten, M. Surfactants and polymers in drug delivery, Informa Health Care, New York, NY, 2002; Lee et al., Critical Reviews in Therapeutic Drug Carrier Systems, 1991, p.92); and perfluorochemical emulsions, such as FC-43. Takahashi et al., J. Pharm. Pharmacol., 1988, 40, 252).

[0459] Various fatty acids and their derivatives which act as penetration enhancers include, for example, oleic acid, lauric acid, capric acid (n-decanoic acid), myristic acid, palmitic acid, stearic acid, linoleic acid, linolenic acid, dicaprate, tricaprate, monoolein (1-monooleoyl-rac-glycerol), dilaurin, caprylic acid, arachidonic acid, glycerol 1-monocaprate, 1-dodecylazacycloheptan-2-one, acylcarnitines, acylcholines, C₁₋₂₀ alkyl esters thereof (e.g., methyl, isopropyl and t-butyl), and mono- and di-glycerides thereof (i.e., oleate, laurate, caprate, myristate, palmitate, stearate, linoleate, etc.) (see e.g., Touitou, E., et al. Enhancement in Drug Delivery, CRC Press, Danvers, M A, 2006; Lee et al., Critical Reviews in Therapeutic Drug Carrier Systems, 1991, p.92; Muranishi, Critical Reviews in Therapeutic Drug Carrier Systems, 1990, 7, 1-33; El Hariri et al., J. Pharm. Pharmacol., 1992, 44, 651-654).

[0460] The physiological role of bile includes the facilitation of dispersion and absorption of lipids and fat-soluble vitamins (see e.g., Malmsten, M. Surfactants and polymers in drug delivery, Informa Health Care, New York, NY, 2002; Brunton, Chapter 38 in: Goodman & Gilman's The Pharmacological Basis of Therapeutics, 9th Ed., Hardman et al. Eds., McGraw-Hill, New York, 1996, pp. 934-935). Various natural bile salts, and their synthetic derivatives, act as penetration enhancers. Thus the term “bile salts” includes any of the naturally occurring components of bile as well as any of their synthetic derivatives. Suitable bile salts include, for example, cholic acid (or its pharmaceutically acceptable sodium salt, sodium cholate), dehydrocholic acid (sodium dehydrocholate), deoxycholic acid (sodium deoxycholate), glucholic acid (sodium glucholate), glycholic acid (sodium glycocholate), glycodeoxycholic acid (sodium glycodeoxycholate), taurocholic acid (sodium taurocholate), taurodeoxycholic acid (sodium taurodeoxycholate), chenodeoxycholic acid (sodium chenodeoxycholate), ursodeoxycholic acid (UDCA), sodium tauro-24,25-dihydro-fusidate (STDHF), sodium glycodihydrofusidate and polyoxyethylene-9-lauryl ether (POE) (see e.g., Malmsten, M. Surfactants and polymers in drug delivery, Informa Health Care, New York, NY, 2002; Lee et al., Critical Reviews in Therapeutic Drug Carrier Systems, 1991, page 92; Swinyard, Chapter 39 In: Remington's Pharmaceutical Sciences, 18th Ed., Gennaro, ed., Mack Publishing Co., Easton, Pa., 1990, pages 782-783; Muranishi, Critical Reviews in Therapeutic Drug Carrier Systems, 1990, 7, 1-33; Yamamoto et al., J. Pharm. Exp. Ther., 1992, 263, 25; Yamashita et al., J. Pharm. Sci., 1990, 79, 579-583).

[0461] Chelating agents, as used in connection with the present invention, can be defined as compounds that remove metallic ions from solution by forming complexes therewith, with the result that absorption of iRNAs through the mucosa is enhanced. With regards to their use as penetration enhancers in the present invention, chelating agents have the added advantage of also serving as DNase inhibitors, as most characterized DNA nucleases require a divalent metal ion for catalysis and are thus inhibited by chelating agents (Jarrett, J. Chromatogr., 1993, 618, 315-339). Suitable chelating agents include but are not limited to disodium ethylenediaminetetraacetate (EDTA), citric acid, salicylates (e.g., sodium salicylate, 5-methoxysalicylate and homovanilate), N-acyl derivatives of collagen, laureth-9 and N-amino acyl derivatives of beta-diketones (enamines)(see e.g., Katdare, A. et al., Excipient development for pharmaceutical, biotechnology, and drug delivery, CRC Press, Danvers, M A, 2006; Lee et al., Critical Reviews in Therapeutic Drug Carrier Systems, 1991, page 92; Muranishi, Critical Reviews in Therapeutic Drug Carrier Systems, 1990, 7, 1-33; Buur et al., J. Control Rel., 1990, 14, 43-51).

[0462] As used herein, non-chelating non-surfactant penetration enhancing compounds can be defined as compounds that demonstrate insignificant activity as chelating agents or as surfactants but that nonetheless enhance absorption of iRNAs through the alimentary mucosa (see e.g., Muranishi, Critical Reviews in Therapeutic Drug Carrier Systems, 1990, 7, 1-33). This class of penetration enhancers includes, for example, unsaturated cyclic ureas, 1-alkyl- and 1-alkenylazacyclo-alkanone derivatives (Lee et al., Critical Reviews in Therapeutic Drug Carrier Systems, 1991, page 92); and non-steroidal anti-inflammatory agents such as diclofenac sodium, indomethacin and phenylbutazone (Yamashita et al., J. Pharm. Pharmacol., 1987, 39, 621-626).

[0463] Agents that enhance uptake of iRNAs at the cellular level can also be added to the pharmaceutical and other compositions of the present invention. For example, cationic lipids, such as lipofectin (Junichi et al, U.S. Pat. No. 5,705,188), cationic glycerol derivatives, and polycationic molecules, such as polylysine (Lollo et al., PCT Application WO 97/30731), are also known to enhance the cellular uptake of dsRNAs. Examples of commercially available transfection reagents include, for example Lipofectamine™ (Invitrogen; Carlsbad, CA), Lipofectamine 2000™ (Invitrogen; Carlsbad, CA), 293Fectin™ (Invitrogen; Carlsbad, CA), Cellfectin™ (Invitrogen; Carlsbad, CA), DMRIE-C™ (Invitrogen; Carlsbad, CA), FrecStyle™ MAX (Invitrogen; Carlsbad, CA), Lipofectamine™ 2000 CD (Invitrogen; Carlsbad, CA), Lipofectamine™ (Invitrogen; Carlsbad, CA), RNAiMAX (Invitrogen; Carlsbad, CA), Oligofectamine™ (Invitrogen; Carlsbad, CA), Optifect™ (Invitrogen; Carlsbad, CA), X-tremeGENE Q2 Transfection Reagent (Roche; Grenzacherstrasse, Switzerland), DOTAP Liposomal Transfection Reagent (Grenzacherstrasse, Switzerland), DOSPER Liposomal Transfection Reagent (Grenzacherstrasse, Switzerland), or Fugene (Grenzacherstrasse, Switzerland), Transfectam® Reagent (Promega; Madison, WI), TransFast™ Transfection Reagent (Promega; Madison, WI), Tfx™-20 Reagent (Promega; Madison, WI), Tfx™-50 Reagent (Promega; Madison, WI), DreamFect™ (OZ Biosciences; Marseille, France), EcoTransfect (OZ Biosciences; Marseille, France), TransPassa D1 Transfection Reagent (New England Biolabs; Ipswich, MA, USA), LyoVec™/LipoGen™ (Invitrogen; San Diego, CA, USA), PerFectin Transfection Reagent (Genlantis; San Diego, CA, USA), NeuroPORTER Transfection Reagent (Genlantis; San Diego, CA, USA), GenePORTER Transfection reagent (Genlantis; San Diego, CA, USA), GenePORTER 2 Transfection reagent (Genlantis; San Diego, CA, USA), Cytofectin Transfection Reagent (Genlantis; San Diego, CA, USA), BaculoPORTER Transfection Reagent (Genlantis; San Diego, CA, USA), TroganPORTER™ transfection Reagent (Genlantis; San Diego, CA, USA), RiboFect (Bioline; Taunton, MA, USA), PlasFect (Bioline; Taunton, MA, USA), UniFECTOR (B-Bridge International; Mountain View, CA, USA), SurcFECTOR (B-Bridge International; Mountain View, CA, USA), or HiFect™ (B-Bridge International, Mountain View, CA, USA), among others.

[0464] Other agents can be utilized to enhance the penetration of the administered nucleic acids, including glycols such as ethylene glycol and propylene glycol, pyrrols such as 2-pyrrol, azones, and terpenes such as limonene and menthone.

v. Carriers

[0465] Certain compositions of the present invention also incorporate carrier compounds in the formulation. As used herein, “carrier compound” or “carrier” can refer to a nucleic acid, or analog thereof, which is inert (i.e., does not possess biological activity per se) but is recognized as a nucleic acid by in vivo processes that reduce the bioavailability of a nucleic acid having biological activity by, for example, degrading the biologically active nucleic acid or promoting its removal from circulation. The coadministration of a nucleic acid and a carrier compound, typically with an excess of the latter substance, can result in a substantial reduction of the amount of nucleic acid recovered in the liver, kidney or other extracirculatory reservoirs, presumably due to competition between the carrier compound and the nucleic acid for a common receptor. For example, the recovery of a partially phosphorothioate dsRNA in hepatic tissue can be reduced when it is coadministered with polyinosinic acid, dextran sulfate, polycytidic acid or 4-acetamido-4′isothiocyano-stilbene-2,2′-disulfonic acid (Miyao et al., DsRNA Res. Dev., 1995, 5, 115-121; Takakura et al., DsRNA & Nucl. Acid Drug Dev., 1996, 6, 177-183.

vi. Excipients

[0466] In contrast to a carrier compound, a “pharmaceutical carrier” or “excipient” is a pharmaceutically acceptable solvent, suspending agent or any other pharmacologically inert vehicle for delivering one or more nucleic acids to an animal. The excipient can be liquid or solid and is selected, with the planned manner of administration in mind, so as to provide for the desired bulk, consistency, etc., when combined with a nucleic acid and the other components of a given pharmaceutical composition. Typical pharmaceutical carriers include, but are not limited to, binding agents (e.g., pregelatinized maize starch, polyvinylpyrrolidone or hydroxypropyl methylcellulose, etc.); fillers (e.g., lactose and other sugars, microcrystalline cellulose, pectin, gelatin, calcium sulfate, ethyl cellulose, polyacrylates or calcium hydrogen phosphate, etc.); lubricants (e.g., magnesium stearate, talc, silica, colloidal silicon dioxide, stearic acid, metallic stearates, hydrogenated vegetable oils, corn starch, polyethylene glycols, sodium benzoate, sodium acetate, etc.); disintegrants (e.g., starch, sodium starch glycolate, etc.); and wetting agents (e.g., sodium lauryl sulphate, etc).

[0467] Pharmaceutically acceptable organic or inorganic excipients suitable for non-parenteral administration which do not deleteriously react with nucleic acids can also be used to formulate the compositions of the present invention. Suitable pharmaceutically acceptable carriers include, but are not limited to, water, salt solutions, alcohols, polyethylene glycols, gelatin, lactose, amylose, magnesium stearate, talc, silicic acid, viscous paraffin, hydroxymethylcellulose, polyvinylpyrrolidone and the like.

[0468] Formulations for topical administration of nucleic acids can include sterile and non-sterile aqueous solutions, non-aqueous solutions in common solvents such as alcohols, or solutions of the nucleic acids in liquid or solid oil bases. The solutions can also contain buffers, diluents and other suitable additives. Pharmaceutically acceptable organic or inorganic excipients suitable for non-parenteral administration which do not deleteriously react with nucleic acids can be used.

[0469] Suitable pharmaceutically acceptable excipients include, but are not limited to, water, salt solutions, alcohol, polyethylene glycols, gelatin, lactose, amylose, magnesium stearate, talc, silicic acid, viscous paraffin, hydroxymethylcellulose, polyvinylpyrrolidone and the like.

vii. Other Components

[0470] The compositions of the present invention can additionally contain other adjunct components conventionally found in pharmaceutical compositions, at their art-established usage levels. Thus, for example, the compositions can contain additional, compatible, pharmaceutically-active materials such as, for example, antipruritics, astringents, local anesthetics or anti-inflammatory agents, or can contain additional materials useful in physically formulating various dosage forms of the compositions of the present invention, such as dyes, flavoring agents, preservatives, antioxidants, opacifiers, thickening agents and stabilizers. However, such materials, when added, should not unduly interfere with the biological activities of the components of the compositions of the present invention. The formulations can be sterilized and, if desired, mixed with auxiliary agents, e.g., lubricants, preservatives, stabilizers, wetting agents, emulsifiers, salts for influencing osmotic pressure, buffers, colorings, flavorings and/or aromatic substances and the like which do not deleteriously interact with the nucleic acid(s) of the formulation.

[0471] Aqueous suspensions can contain substances which increase the viscosity of the suspension including, for example, sodium carboxymethylcellulose, sorbitol and/or dextran. The suspension can also contain stabilizers.

[0472] In some embodiments, pharmaceutical compositions featured in the invention include (a) one or more iRNA compounds and (b) one or more agents which function by a non-RNAi mechanism and which are useful in treating a hemolytic disorder. Examples of such agents include, but are not limited to an anti-inflammatory agent, anti-steatosis agent, anti-viral, and/or anti-fibrosis agent. In addition, other substances commonly used to protect the liver, such as silymarin, can also be used in conjunction with the iRNAs described herein. Other agents useful for treating liver diseases include telbivudine, entecavir, and protease inhibitors such as telaprevir and other disclosed, for example, in Tung et al., U.S. Application Publication Nos. 2005/0148548, 2004/0167116, and 2003/0144217; and in Hale et al., U.S. Application Publication No. 2004/0127488.

[0473] Toxicity and therapeutic efficacy of such compounds can be determined by standard pharmaceutical procedures in cell cultures or experimental animals, e.g., for determining the LD50 (the dose lethal to 50% of the population) and the ED50 (the dose therapeutically effective in 50% of the population). The dose ratio between toxic and therapeutic effects is the therapeutic index and it can be expressed as the ratio LD50/ED50. Compounds that exhibit high therapeutic indices are preferred.

[0474] The data obtained from cell culture assays and animal studies can be used in formulating a range of dosage for use in humans. The dosage of compositions featured herein in the invention lies generally within a range of circulating concentrations that include the ED50 with little or no toxicity. The dosage can vary within this range depending upon the dosage form employed and the route of administration utilized. For any compound used in the methods featured in the invention, the therapeutically effective dose can be estimated initially from cell culture assays. A dose can be formulated in animal models to achieve a circulating plasma concentration range of the compound or, when appropriate, of the polypeptide product of a target sequence (e.g., achieving a decreased concentration of the polypeptide) that includes the IC50 (i.e., the concentration of the test compound which achieves a half-maximal inhibition of symptoms) as determined in cell culture. Such information can be used to more accurately determine useful doses in humans. Levels in plasma can be measured, for example, by high performance liquid chromatography.

[0475] In addition to their administration, as discussed above, the iRNAs featured in the invention can be administered in combination with other known agents effective in treatment of pathological processes mediated by PCSK9 expression. In any event, the administering physician can adjust the amount and timing of iRNA administration on the basis of results observed using standard measures of efficacy known in the art or described herein.

### VI. KITS

[0476] The present invention also provides kits for using any of the iRNA agents and/or performing any of the methods of the invention. Such kits include one or more RNAi agent(s) and instructions for use, e.g., instructions for inhibiting expression of a PCSK9 in a cell by contacting the cell with the RNAi agent(s) in an amount effective to inhibit expression of the PCSK9. The kits may optionally further comprise means for contacting the cell with the RNAi agent (e.g., an injection device), or means for measuring the inhibition of PCSK9 (e.g., means for measuring the inhibition of PCSK9 mRNA protein). Such means for measuring the inhibition of PCSK9 may comprise a means for obtaining a sample from a subject, such as, e.g., a plasma sample. The kits of the invention may optionally further comprise means for administering the RNAi agent(s) to a subject or means for determining the therapeutically effective or prophylactically effective amount.

[0477] Unless otherwise defined, all technical and scientific terms used herein have the same meaning as commonly understood by one of ordinary skill in the art to which this invention belongs. Although methods and materials similar or equivalent to those described herein can be used in the practice or testing of the iRNAs and methods featured in the invention, suitable methods and materials are described below. All publications, patent applications, patents, and other references mentioned herein, as well as the Sequence Listing and Figures, are incorporated by reference in their entirety. In case of conflict, the present specification, including definitions, will control. In addition, the materials, methods, and examples are illustrative only and not intended to be limiting.

### EXAMPLES

### Example 1. Synthesis of GalNAc-Conjugated Oligonucleotides

[0478] A series of siRNA duplexes targeting nucleotides 3544-3623 of the human PCSK9 gene (SEQ ID NO:1) were designed, synthesized. These same sequences were also synthesized with various nucleotide modifications and conjugated with a trivalent GalNAc. The sense and antisense strand sequences of the modified duplexes are shown in Table 1.

TABLE B
Abbreviations of nucleotide monomers
used in nucleic acid sequence representation.

| Abbreviation | Nucleotide(s) |
|---|---|
| A | Adenosine-3′-phosphate |
| Ab | beta-L-adenosine-3′-phosphate |
| Af | 2′-fluoroadenosine-3′-phosphate |
| Afs | 2′-fluoroadenosine-3′-phosphorothioate |
| As | adenosine-3′-phosphorothioate |
| C | cytidine-3′-phosphate |
| Cb | beta-L-cytidine-3′-phosphate |
| Cf | 2′-fluorocytidine-3′-phosphate |
| Cfs | 2′-fluorocytidine-3′-phosphorothioate |
| Cs | cytidine-3′-phosphorothioate |
| G | guanosine-3′-phosphate |
| Gb | beta-L-guanosine-3′-phosphate |
| Gbs | beta-L-guanosine-3′-phosphorothioate |
| Gf | 2′-fluoroguanosine-3′-phosphate |
| Gfs | 2′-fluoroguanosine-3′-phosphorothioate |
| Gs | guanosine-3′-phosphorothioate |
| T | 5′-methyluridine-3′-phosphate |
| Tf | 2′-fluoro-5-methyluridine-3′-phosphate |
| Tfs | 2′-fluoro-5-methyluridine-3′-phosphorothioate |
| Ts | 5-methyluridine-3′-phosphorothioate |
| U | Uridine-3′-phosphate |
| Uf | 2′-fluorouridine-3′-phosphate |
| Ufs | 2′-fluorouridine-3′-phosphorothioate |
| Us | uridine-3′-phosphorothioate |
| N | any nucleotide (G, A, C, T or U) |
| a | 2′-O-methyladenosine-3′-phosphate |
| as | 2′-O-methyladenosine-3′-phosphorothioate |
| c | 2′-O-methylcytidine-3′-phosphate |
| cs | 2′-O-methylcytidine-3′-phosphorothioate |
| g | 2′-O-methylguanosine-3′-phosphate |
| gs | 2′-O-methylguanosine-3′-phosphorothioate |
| t | 2′-O-methyl-5-methyluridine-3′-phosphate |
| ts | 2′-O-methyl-5-methyluridine-3′-phosphorothioate |
| u | 2′-O-methyluridine-3′-phosphate |
| us | 2′-O-methyluridine-3′-phosphorothioate |
| dT | 2′-deoxythymidine-3′-phosphate |
| dTs | 2′-deoxythymidine-3′-phosphorothioate |
| dU | 2′-deoxyuridine-3′-phosphate |
| dUs | 2′-deoxyuridine-3′-phosphorothioate |
| s | phosphorothioate linkage |
| L96 | N-[tris(GalNAc-alkyl)-amidodecanoyl)]-4- |
| | hydroxyprolinol Hyp-(GalNAc-alkyl)3 |
| (Aeo) | 2′-O-methoxyethyladenosine-3′-phosphate |
| (Aeos) | 2′-O-methoxyethyladenosine-3′-phosphorothioate |
| (Geo) | 2′-O-methoxyethylguanosine-3′-phosphate |
| (Geos) | 2′-O-methoxyethylguanosine-3′-phosphorothioate |
| (Teo) | 2′-O-methoxyethyl-5-methyluridine-3′-phosphate |
| (Teos) | 2′-O-methoxyethyl-5-methyluridine-3′-phosphorothioate |
| (m5Ceo) | 2′-O-methoxyethyl-5-methylcytidine-3′-phosphate |
| (m5Ceos) | 2′-O-methoxyethyl-5-methylcytidine-3′-phosphorothioate |
| (A3m) | 3′-O-methyladenosine-2′-phosphate |
| (A3mx) | 3′-O-methyl-xylofuranosyladenosine-2′-phosphate |
| (G3m) | 3′-O-methylguanosine-2′-phosphate |
| (G3mx) | 3′-O-methyl-xylofuranosylguanosine-2′-phosphate |
| (C3m) | 3′-O-methylcytidine-2′-phosphate |
| (C3mx) | 3′-O-methyl-xylofuranosylcytidine-2′-phosphate |
| (U3m) | 3′-O-methyluridine-2′-phosphate |
| (U3mx) | 3′-O-methylxylouridine-2′-phosphate |
| (Chd) | 2′-O-hexadecyl-cytidine-3′-phosphate |
| (pshe) | Hydroxyethylphosphorothioate |
| (Uhd) | 2′-O-hexadecyl-uridine-3′-phosphate |
| (Tgn) | Thymidine-glycol nucleic acid (GNA) S-Isomer |
| (Cgn) | Cytidine-glycol nucleic acid (GNA) |
| (Chd) | 2′-O-hexadecyl-cytidine-3′-phosphate |
| (Ggn) | 2′-O-hexadecyl-cytidine-3′-phosphate |
| (Agn) | Adenosine-glycol nucleic acid (GNA) |
| P | 5′-phosphate |
| (m5Cam) | 2′-O-(N-methylacetamide)-5-methylcytidine-3′-phosphate |
| (m5Cams) | 2′-O-(N-methylacetamide)-5-methylcytidine-3′- |
| | phosphorothioate |
| (Tam) | 2′-O-(N-methylacetamide)thymidine-3′-phosphate |
| (Tams) | 2′-O-(N-methylacetamide)thymidine-3′-phosphorothioate |
| (Aam) | 2′-O-(N-methylacetamide)adenosine-3′-phosphate |
| (Aams) | 2′-O-(N-methylacetamide)adenosine-3′-phosphorothioate |
| (Gam) | 2′-O-(N-methylacetamide)guanosine-3′-phosphate |
| (Gams) | 2′-O-(N-methylacetamide)guanosine-3′-phosphorothioate |
| (Uyh) | 2′-O-(1-hexyl-4-methylene-1,2,3-triazolyl)-uridine-3′- |
| | phosphate |
| (Ayh) | 2′-O-(1-hexyl-4-methylene-1,2,3-triazolyl)-adenosine-3′- |
| | phosphate |
| (Gyh) | 2′-O-(1-hexyl-4-methylene-1,2,3-triazolyl)-guanosine-3′- |
| | phosphate |
| (Cyh) | 2′-O-(1-hexyl-4-methylene-1,2,3-triazolyl)-cytidine-3′- |
| | phosphate |
| (iA) | inverted adenosine-5′-phosphate |
| (iC) | inverted cytidine-5′-phosphate |

TABLE 1
Double-Stranded Ribonucleic Acid (RNAi) Agents Targeting Nucleotides 3544-3623 of Human PCSK9 (SEQ ID NO: 1).

| | | SEQ | | | | SEQ | |
|---|---|---|---|---|---|---|---|
| Duplex | | ID | | Start In | Antisense | ID | |
| ID | Sense ID | NO: | Sense Sequence (5′ to 3′) | NM_174936.3 | ID | NO: | Antisense Sequence (5′ to 3′) |
| AD-53806 | A-110717 | 7 | CfaAfgCfaGfaCfAfUfuUfaUfcUfuUfuUfL96 | 3544 | A-109589 | 8 | aAfaAfaGfaUfaAfaugUfcUfgCfuUfgsCfsu |
| AD-53806 | A-110717 | 9 | CfaAfgCfaGfaCfAfUfuUfaUfcUfuUfuUfL96 | 3544 | A-109589 | 10 | aAfaAfaGfaUfaAfaugUfcUfgCfuUfgsCfsu |
| AD-53806 | A-110717 | 11 | CfaAfgCfaGfaCfAfUfuUfaUfcUfuUfuUfL96 | 3544 | A-109589 | 12 | aAfaAfaGfaUfaAfaugUfcUfgCfuUfgsCfsu |
| AD-53806 | A-110717 | 13 | CfaAfgCfaGfaCfAfUfuUfaUfcUfuUfuUfL96 | 3544 | A-109589 | 14 | aAfaAfaGfaUfaAfaugUfcUfgCfuUfgsCfsu |
| AD-53806 | A-110717 | 15 | CfaAfgCfaGfaCfAfUfuUfaUfcUfuUfuUfL96 | 3544 | A-109589 | 16 | aAfaAfaGfaUfaAfaugUfcUfgCfuUfgsCfsu |
| AD-53806 | A-110717 | 17 | CfaAfgCfaGfaCfAfUfuUfaUfcUfuUfuUfL96 | 3544 | A-109589 | 18 | aAfaAfaGfaUfaAfaugUfcUfgCfuUfgsCfsu |
| AD-53806 | A-110717.6 | 19 | CfaAfgCfaGfaCfAfUfuUfaUfcUfuUfuUfL96 | 3544 | A-109589 | 20 | aAfaAfaGfaUfaAfaugUfcUfgCfuUfgsCfsu |
| AD-53806 | A-110717.7 | 21 | CfaAfgCfaGfaCfAfUfuUfaUfcUfuUfuUfL96 | 3544 | A-109589 | 22 | aAfaAfaGfaUfaAfaugUfcUfgCfuUfgsCfsu |
| AD-53806 | A-110717.8 | 23 | CfaAfgCfaGfaCfAfUfuUfaUfcUfuUfuUfL96 | 3544 | A-109589 | 24 | aAfaAfaGfaUfaAfaugUfcUfgCfuUfgsCfsu |
| AD-53806 | A-110717.9 | 25 | CfaAfgCfaGfaCfAfUfuUfaUfcUfuUfuUfL96 | 3544 | A-109589 | 26 | aAfaAfaGfaUfaAfaugUfcUfgCfuUfgsCfsu |
| AD-56979 | A-116393 | 27 | caAfgCfaGfaCfAfUfuUfaUfcUfuUfuUfL96 | 3544 | A-109589 | 28 | aAfaAfaGfaUfaAfaugUfcUfgCfuUfgsCfsu |
| AD-56979 | A-116393 | 29 | caAfgCfaGfaCfAfUfuUfaUfcUfuUfuUfL96 | 3544 | A-109589 | 30 | aAfaAfaGfaUfaAfaugUfcUfgCfuUfgsCfsu |
| AD-56975 | A-116394 | 31 | (iC)aAfgCfaGfaCfAfUfuUfaUfcUfuUfuUfL96 | 3544 | A-109589 | 32 | aAfaAfaGfaUfaAfaugUfcUfgCfuUfgsCfsu |
| AD-56975 | A-116394 | 33 | (iC)aAfgCfaGfaCfAfUfuUfaUfcUfuUfuUfL96 | 3544 | A-109589 | 34 | aAfaAfaGfaUfaAfaugUfcUfgCfuUfgsCfsu |
| AD-56975 | A-116394 | 35 | (iC)aAfgCfaGfaCfAfUfuUfaUfcUfuUfuUfL96 | 3544 | A-109589 | 36 | aAfaAfaGfaUfaAfaugUfcUfgCfuUfgsCfsu |
| AD-56975 | A-116394 | 37 | (iC)aAfgCfaGfaCfAfUfuUfaUfcUfuUfuUfL96 | 3544 | A-109589 | 38 | aAfaAfaGfaUfaAfaugUfcUfgCfuUfgsCfsu |
| AD-56975 | A-116394 | 39 | (iC)aAfgCfaGfaCfAfUfuUfaUfcUfuUfuUfL96 | 3544 | A-109589 | 40 | aAfaAfaGfaUfaAfaugUfcUfgCfuUfgsCfsu |
| AD-56983 | A-116400 | 41 | CbaAfgCfaGfaCfAfUfuUfaUfcUfuUfuUfL96 | 3544 | A-109589 | 42 | aAfaAfaGfaUfaAfaugUfcUfgCfuUfgsCfsu |
| AD-56983 | A-116400 | 43 | CbaAfgCfaGfaCfAfUfuUfaUfcUfuUfuUfL96 | 3544 | A-109589 | 44 | aAfaAfaGfaUfaAfaugUfcUfgCfuUfgsCfsu |
| AD-56983 | A-116400 | 45 | CbaAfgCfaGfaCfAfUfuUfaUfcUfuUfuUfL96 | 3544 | A-109589 | 46 | aAfaAfaGfaUfaAfaugUfcUfgCfuUfgsCfsu |
| AD-56983 | A-116400 | 47 | CbaAfgCfaGfaCfAfUfuUfaUfcUfuUfuUfL96 | 3544 | A-109589 | 48 | aAfaAfaGfaUfaAfaugUfcUfgCfuUfgsCfsu |
| AD-56983 | A-116400 | 49 | CbaAfgCfaGfaCfAfUfuUfaUfcUfuUfuUfL96 | 3544 | A-109589 | 50 | aAfaAfaGfaUfaAfaugUfcUfgCfuUfgsCfsu |
| AD-56977 | A-116406 | 51 | CfaagCfaGfaCfAfUfuUfaUfcUfuUfuUfL96 | 3544 | A-109589 | 52 | aAfaAfaGfaUfaAfaugUfcUfgCfuUfgsCfsu |
| AD-56977 | A-116406 | 53 | CfaagCfaGfaCfAfUfuUfaUfcUfuUfuUfL96 | 3544 | A-109589 | 54 | aAfaAfaGfaUfaAfaugUfcUfgCfuUfgsCfsu |
| AD-56977 | A-116406 | 55 | CfaagCfaGfaCfAfUfuUfaUfcUfuUfuUfL96 | 3544 | A-109589 | 56 | aAfaAfaGfaUfaAfaugUfcUfgCfuUfgsCfsu |
| AD-56976 | A-116407 | 57 | CfaagCfaGfaCfAfUfuUfaucUfuUfuUfL96 | 3544 | A-109589 | 58 | aAfaAfaGfaUfaAfaugUfcUfgCfuUfgsCfsu |
| AD-56976 | A-116407 | 59 | CfaagCfaGfaCfAfUfuUfaucUfuUfuUfL96 | 3544 | A-109589 | 60 | aAfaAfaGfaUfaAfaugUfcUfgCfuUfgsCfsu |
| AD-56980 | A-116408 | 61 | CfaagCfagaCfAfUfuUfaucUfuUfuUfL96 | 3544 | A-109589 | 62 | aAfaAfaGfaUfaAfaugUfcUfgCfuUfgsCfsu |
| AD-56980 | A-116408 | 63 | CfaagCfagaCfAfUfuUfaucUfuUfuUfL96 | 3544 | A-109589 | 64 | aAfaAfaGfaUfaAfaugUfcUfgCfuUfgsCfsu |
| AD-56984 | A-116409 | 65 | CfaagCfagaCfAfUfuUfaucUfuuuUfL96 | 3544 | A-109589 | 66 | aAfaAfaGfaUfaAfaugUfcUfgCfuUfgsCfsu |
| AD-56984 | A-116409 | 67 | CfaagCfagaCfAfUfuUfaucUfuuuUfL96 | 3544 | A-109589 | 68 | aAfaAfaGfaUfaAfaugUfcUfgCfuUfgsCfsu |
| AD-56987 | A-116410 | 69 | CfaagCfagaCfAfUfuUfaucUfuuuuL96 | 3544 | A-109589 | 70 | aAfaAfaGfaUfaAfaugUfcUfgCfuUfgsCfsu |
| AD-56987 | A-116410 | 71 | CfaagCfagaCfAfUfuUfaucUfuuuuL96 | 3544 | A-109589 | 72 | aAfaAfaGfaUfaAfaugUfcUfgCfuUfgsCfsu |
| AD-56991 | A-116415 | 73 | CfaagCfagaCfAfUfuUfaucuuuuuL96 | 3544 | A-109589 | 74 | aAfaAfaGfaUfaAfaugUfcUfgCfuUfgsCfsu |
| AD-56993 | A-116416 | 75 | CfaagcagaCfAfUfuUfaucuuuuuL96 | 3544 | A-109589 | 76 | aAfaAfaGfaUfaAfaugUfcUfgCfuUfgsCfsu |
| AD-56995 | A-116417 | 77 | CfaagcagaCfAfUfuuaucuuuuuL96 | 3544 | A-109589 | 78 | aAfaAfaGfaUfaAfaugUfcUfgCfuUfgsCfsu |
| AD-56978 | A-116418 | 79 | CfaAfGfCfaGfaCfAfUfuUfaUfcUfuUfuUfL96 | 3544 | A-109589 | 80 | aAfaAfaGfaUfaAfaugUfcUfgCfuUfgsCfsu |
| AD-56978 | A-116418 | 81 | CfaAfGfCfaGfaCfAfUfuUfaUfcUfuUfuUfL96 | 3544 | A-109589 | 82 | aAfaAfaGfaUfaAfaugUfcUfgCfuUfgsCfsu |
| AD-56981 | A-116419 | 83 | CfaAfGfCfaGfaCfAfUfuUfAfUfcUfuUfuUfL96 | 3544 | A-109589 | 84 | aAfaAfaGfaUfaAfaugUfcUfgCfuUfgsCfsu |
| AD-56985 | A-116420 | 85 | CfaAfGfCfaGfaCfAfUfuUfAfUfCfUfuUfuUfL96 | 3544 | A-109589 | 86 | aAfaAfaGfaUfaAfaugUfcUfgCfuUfgsCfsu |
| AD-56988 | A-116421 | 87 | CfaAfGfCfAfGfaCfAfUfuUfAfUfCfUfuUfuUfL96 | 3544 | A-109589 | 88 | aAfaAfaGfaUfaAfaugUfcUfgCfuUfgsCfsu |
| AD-56988 | A-116421 | 89 | CfaAfGfCfAfGfaCfAfUfuUfAfUfCfUfuUfuUfL96 | 3544 | A-109589 | 90 | aAfaAfaGfaUfaAfaugUfcUfgCfuUfgsCfsu |
| AD-56988 | A-116421 | 91 | CfaAfGfCfAfGfaCfAfUfuUfAfUfCfUfuUfuUfL96 | 3544 | A-109589 | 92 | aAfaAfaGfaUfaAfaugUfcUfgCfuUfgsCfsu |
| AD-56982 | A-116426 | 93 | CfaAfgcaGfaCfAfUfuUfaUfcUfuUfuUfL96 | 3544 | A-109589 | 94 | aAfaAfaGfaUfaAfaugUfcUfgCfuUfgsCfsu |
| AD-56982 | A-116426 | 95 | CfaAfgcaGfaCfAfUfuUfaUfcUfuUfuUfL96 | 3544 | A-109589 | 96 | aAfaAfaGfaUfaAfaugUfcUfgCfuUfgsCfsu |
| AD-56986 | A-116428 | 97 | CfaAfgCfagaCfAfUfuUfaUfcUfuUfuUfL96 | 3544 | A-109589 | 98 | aAfaAfaGfaUfaAfaugUfcUfgCfuUfgsCfsu |
| AD-56986 | A-116428 | 99 | CfaAfgCfagaCfAfUfuUfaUfcUfuUfuUfL96 | 3544 | A-109589 | 100 | aAfaAfaGfaUfaAfaugUfcUfgCfuUfgsCfsu |
| AD-56989 | A-116430 | 101 | CfaAfgCfaGfacAfUfuUfaUfcUfuUfuUfL96 | 3544 | A-109589 | 102 | aAfaAfaGfaUfaAfaugUfcUfgCfuUfgsCfsu |
| AD-56990 | A-116432 | 103 | CfaAfgCfaGfaCfAfuuUfaUfcUfuUfuUfL96 | 3544 | A-109589 | 104 | aAfaAfaGfaUfaAfaugUfcUfgCfuUfgsCfsu |
| AD-56992 | A-116434 | 105 | CfaAfgCfaGfaCfAfUfuUfaucUfuUfuUfL96 | 3544 | A-109589 | 106 | aAfaAfaGfaUfaAfaugUfcUfgCfuUfgsCfsu |
| AD-56992 | A-116434 | 107 | CfaAfgCfaGfaCfAfUfuUfaucUfuUfuUfL96 | 3544 | A-109589 | 108 | aAfaAfaGfaUfaAfaugUfcUfgCfuUfgsCfsu |
| AD-56994 | A-116436 | 109 | CfaAfgCfaGfaCfAfUfuUfaUfcUfuuuUfL96 | 3544 | A-109589 | 110 | aAfaAfaGfaUfaAfaugUfcUfgCfuUfgsCfsu |
| AD-56994 | A-116436 | 111 | CfaAfgCfaGfaCfAfUfuUfaUfcUfuuuUfL96 | 3544 | A-109589 | 112 | aAfaAfaGfaUfaAfaugUfcUfgCfuUfgsCfsu |
| AD-56996 | A-116438 | 113 | caagCfaGfaCfAfUfuUfaUfcUfuUfuUfL96 | 3544 | A-109589 | 114 | aAfaAfaGfaUfaAfaugUfcUfgCfuUfgsCfsu |
| AD-57001 | A-116440 | 115 | CfaAfgcagaCfAfUfuUfaUfcUfuUfuUfL96 | 3544 | A-109589 | 116 | aAfaAfaGfaUfaAfaugUfcUfgCfuUfgsCfsu |
| AD-57007 | A-116442 | 117 | CfaAfgCfaGfaCfAfuuuaUfcUfuUfuUfL96 | 3544 | A-109589 | 118 | aAfaAfaGfaUfaAfaugUfcUfgCfuUfgsCfsu |
| AD-57013 | A-116444 | 119 | CfaAfgCfaGfaCfAfUfuUfaucuuUfuUfL96 | 3544 | A-109589 | 120 | aAfaAfaGfaUfaAfaugUfcUfgCfuUfgsCfsu |
| AD-57019 | A-116446 | 121 | CfaAfgCfaGfaCfAfUfuUfaUfcUfuuuuL96 | 3544 | A-109589 | 122 | aAfaAfaGfaUfaAfaugUfcUfgCfuUfgsCfsu |
| AD-57022 | A-116448 | 123 | CfaAfgCfaGfaCfAfUfuUfaUfcUfUfUfuUfL96 | 3544 | A-109589 | 124 | aAfaAfaGfaUfaAfaugUfcUfgCfuUfgsCfsu |
| AD-57025 | A-116449 | 125 | CfaAfgCfaGfaCfAfUfuUfaUfCfUfuUfuUfL96 | 3544 | A-109589 | 126 | aAfaAfaGfaUfaAfaugUfcUfgCfuUfgsCfsu |
| AD-56997 | A-116450 | 127 | CfaAfgCfaGfaCfAfUfuUfAfUfcUfuUfuUfL96 | 3544 | A-109589 | 128 | aAfaAfaGfaUfaAfaugUfcUfgCfuUfgsCfsu |
| AD-57002 | A-116452 | 129 | CfaAfgCfaGfaCfAfUfUfUfaUfcUfuUfuUfL96 | 3544 | A-109589 | 130 | aAfaAfaGfaUfaAfaugUfcUfgCfuUfgsCfsu |
| AD-57008 | A-116453 | 131 | CfaAfgCfaGfAfCfAfUfuUfaUfcUfuUfuUfL96 | 3544 | A-109589 | 132 | aAfaAfaGfaUfaAfaugUfcUfgCfuUfgsCfsu |
| AD-57014 | A-116454 | 133 | CfaAfgCfAfGfAfCfAfUfuUfaUfcUfuUfuUfL96 | 3544 | A-109589 | 134 | aAfaAfaGfaUfaAfaugUfcUfgCfuUfgsCfsu |
| AD-57020 | A-116455 | 135 | CfAfAfgCfaGfaCfAfUfuUfaUfcUfuUfuUfL96 | 3544 | A- | 136 | aAfaAfaGfaUfaAfaugUfcUfgCfuUfgsCfsu |
| | | | | | 1095893 | | |
| AD-57020 | A-116455 | 137 | CfAfAfgCfaGfaCfAfUfuUfaUfcUfuUfuUfL96 | 3544 | A- | 138 | aAfaAfaGfaUfaAfaugUfcUfgCfuUfgsCfsu |
| | | | | | 1095893 | | |
| AD-57026 | A-116457 | 139 | CfaAfgCfaGfaCfAfUfuUfaUfcuuUfuUfL96 | 3544 | A- | 140 | aAfaAfaGfaUfaAfaugUfcUfgCfuUfgsCfsu |
| | | | | | 1095893 | | |
| AD-57003 | A-116460 | 141 | CfaAfgCfaGfaCfAfUfuuaUfcUfuUfuUfL96 | 3544 | A-109589 | 142 | aAfaAfaGfaUfaAfaugUfcUfgCfuUfgsCfsu |
| AD-57009 | A-116462 | 143 | CfaAfgCfaGfaCfauuUfaUfcUfuUfuUfL96 | 3544 | A-109589 | 144 | aAfaAfaGfaUfaAfaugUfcUfgCfuUfgsCfsu |
| AD-57015 | A-116464 | 145 | CfaAfgCfaGfacaUfuUfaUfcUfuUfuUfL96 | 3544 | A-109589 | 146 | aAfaAfaGfaUfaAfaugUfcUfgCfuUfgsCfsu |
| AD-57023 | A-116467 | 147 | CfaAfgCfaGfaCfAfUfuUfaucUfUfUfuUfL96 | 3544 | A-109589 | 148 | aAfaAfaGfaUfaAfaugUfcUfgCfuUfgsCfsu |
| AD-57027 | A-116469 | 149 | CfaAfgCfaGfaCfAfUfuuaUfcUfUfUfuUfL96 | 3544 | A-109589 | 150 | aAfaAfaGfaUfaAfaugUfcUfgCfuUfgsCfsu |
| AD-56998 | A-116471 | 151 | CfaAfgCfagaCfAfUfuUfaUfcUfUfUfuUfL96 | 3544 | A-109589 | 152 | aAfaAfaGfaUfaAfaugUfcUfgCfuUfgsCfsu |
| AD-57004 | A-116473 | 153 | CfaAfgcaGfaCfAfUfuUfaUfcUfUfUfuUfL96 | 3544 | A-109589 | 154 | aAfaAfaGfaUfaAfaugUfcUfgCfuUfgsCfsu |
| AD-57010 | A-116475 | 155 | CfaagCfaGfaCfAfUfuUfaUfcUfUfUfuUfL96 | 3544 | A-109589 | 156 | aAfaAfaGfaUfaAfaugUfcUfgCfuUfgsCfsu |
| AD-57016 | A-116477 | 157 | caAfgCfaGfaCfAfUfuUfaUfcUfUfUfuUfL96 | 3544 | A-109589 | 158 | aAfaAfaGfaUfaAfaugUfcUfgCfuUfgsCfsu |
| AD-56999 | A-116479 | 159 | CfaAfgCfaGfaCfAfUfuUfAfUfcUfUfUfuUfL96 | 3544 | A-109589 | 160 | aAfaAfaGfaUfaAfaugUfcUfgCfuUfgsCfsu |
| AD-56999 | A-116479 | 161 | CfaAfgCfaGfaCfAfUfuUfAfUfcUfUfUfuUfL96 | 3544 | A-109589 | 162 | aAfaAfaGfaUfaAfaugUfcUfgCfuUfgsCfsu |
| AD-57021 | A-116481 | 163 | CfaAfgCfAfGfaCfAfUfuUfaUfcUfUfUfuUfL96 | 3544 | A-109589 | 164 | aAfaAfaGfaUfaAfaugUfcUfgCfuUfgsCfsu |
| AD-57024 | A-116483 | 165 | CfaAfGfCfaGfaCfAfUfuUfaUfcUfUfUfuUfL96 | 3544 | A-109589 | 166 | aAfaAfaGfaUfaAfaugUfcUfgCfuUfgsCfsu |
| AD-57005 | A-116486 | 167 | CfaAfgCfaGfaCfAfUfuUfaUfCfUfuuuUfL96 | 3544 | A-109589 | 168 | aAfaAfaGfaUfaAfaugUfcUfgCfuUfgsCfsu |
| AD-57011 | A-116488 | 169 | CfaAfgCfaGfaCfAfUfuuaUfCfUfuUfuUfL96 | 3544 | A-109589 | 170 | aAfaAfaGfaUfaAfaugUfcUfgCfuUfgsCfsu |
| AD-57017 | A-116490 | 171 | CfaAfGfCfagaCfAfUfuUfaUfcUfuUfuUfL96 | 3544 | A-109589 | 172 | aAfaAfaGfaUfaAfaugUfcUfgCfuUfgsCfsu |
| AD-57000 | A-116492 | 173 | Cf(Aeo)Af(Geo)CfaGfaCfAfUfuUfaUfcUf(Teo) | 3544 | A-109589 | 174 | aAfaAfaGfaUfaAfaugUfcUfgCfuUfgsCfsu |
| | | | Uf(Teo)UfL96 | | | | |
| AD-57000 | A-116492 | 175 | Cf(Aeo)Af(Geo)CfaGfaCfAfUfuUfaUfcUf(Teo) | 3544 | A-109589 | 176 | aAfaAfaGfaUfaAfaugUfcUfgCfuUfgsCfsu |
| | | | Uf(Teo)UfL96 | | | | |
| AD-57000 | A-116492 | 177 | Cf(Aeo)Af(Geo)CfaGfaCfAfUfuUfaUfcUf(Teo) | 3544 | A-109589 | 178 | aAfaAfaGfaUfaAfaugUfcUfgCfuUfgsCfsu |
| | | | Uf(Teo)UfL96 | | | | |
| AD-57006 | A-116494 | 179 | Cf(Aeo)Af(Geo)CfaGfaCfAfUfuUf(Aeo)Uf | 3544 | A-109589 | 180 | aAfaAfaGfaUfaAfaugUfcUfgCfuUfgsCfsu |
| | | | (m5Ceo)Uf(Teo)Uf(Teo)UfL96 | | | | |
| AD-57006 | A-116494 | 181 | Cf(Aeo)Af(Geo)CfaGfaCfAfUfuUf(Aeo)Uf | 3544 | A-109589 | 182 | aAfaAfaGfaUfaAfaugUfcUfgCfuUfgsCfsu |
| | | | (m5Ceo)Uf(Teo)Uf(Teo)UfL96 | | | | |
| AD-57006 | A-116494 | 183 | Cf(Aeo)Af(Geo)CfaGfaCfAfUfuUf(Aeo)Uf | 3544 | A-109589 | 184 | aAfaAfaGfaUfaAfaugUfcUfgCfuUfgsCfsu |
| | | | (m5Ceo)Uf(Teo)Uf(Teo)UfL96 | | | | |
| AD-57012 | A-116498 | 185 | Cf(Aeo)Af(Geo)CfaGfaCfAfUfuUfaUfcUf(Teo) | 3544 | A-109589 | 186 | aAfaAfaGfaUfaAfaugUfcUfgCfuUfgsCfsu |
| | | | Uf(Teo)UbL96 | | | | |
| AD-57018 | A-116500 | 187 | Cf(Aeo)Af(Geo)CfaGfaCfAfUfuUf(Aeo)Uf | 3544 | A-109589 | 188 | aAfaAfaGfaUfaAfaugUfcUfgCfuUfgsCfsu |
| | | | (m5Ceo)Uf(Teo)Uf(Teo)UbL96 | | | | |
| AD-53812 | A-110718 | 189 | AfaGfcAfgAfcAfUfUfuAfuCfuUfuUfgAfL96 | 3545 | A-109591 | 190 | uCfaAfaAfgAfuAfaauGfuCfuGfcUfusGfsc |
| AD-53818 | A-110719 | 191 | AfgCfaGfaCfaUfUfUfaUfcUfuUfuGfgAfL96 | 3546 | A-109593 | 192 | uCfcAfaAfaGfaUfaaaUfgUfcUfgCfusUfsg |
| AD-53766 | A-110679 | 193 | GfcAfgAfcAfuUfUfAfuCfuUfuUfgGfgUfL96 | 3547 | A-109513 | 194 | aCfcCfaAfaAfgAfuaaAfuGfuCfuGfcsUfsu |
| AD-53772 | A-110680 | 195 | AfgAfcAfuUfuAfUfCfuUfuUfgGfgUfcUfL96 | 3549 | A-109515 | 196 | aGfaCfcCfaAfaAfgauAfaAfuGfuCfusGfsc |
| AD-53824 | A-110720 | 197 | GfaCfaUfuUfaUfCfUfuUfuGfgGfuCfuUfL96 | 3550 | A-109595 | 198 | aAfgAfcCfcAfaAfagaUfaAfaUfgUfcsUfsg |
| AD-53778 | A-110681 | 199 | AfcAfuUfuAfuCfUfUfuUfgGfgUfcUfgUfL96 | 3551 | A-109517 | 200 | aCfaGfaCfcCfaAfaagAfuAfaAfuGfusCfsu |
| AD-53784 | A-110682 | 201 | UfuUfaUfcUfuUfUfGfgGfuCfuGfuCfcUfL96 | 3554 | A-109519 | 202 | aGfgAfcAfgAfcCfcaaAfaGfaUfaAfasUfsg |
| AD-53829 | A-110721 | 203 | UfuAfuCfuUfuUfGfGfgUfcUfgUfcCfuUfL96 | 3555 | A-109597 | 204 | aAfgGfaCfaGfaCfccaAfaAfgAfuAfasAfsu |
| AD-53790 | A-110683 | 205 | UfaUfcUfuUfuGfGfGfuCfuGfuCfcUfcUfL96 | 3556 | A-109521 | 206 | aGfaGfgAfcAfgAfcccAfaAfaGfaUfasAfsa |
| AD-53835 | A-110722 | 207 | AfuCfuUfuUfgGfGfUfcUfgUfcCfuCfuUfL96 | 3557 | A-109599 | 208 | aAfgAfgGfaCfaGfaccCfaAfaAfgAfusAfsa |
| AD-53796 | A-110684 | 209 | UfcUfuUfuGfgGfUfCfuGfuCfcUfcUfcUfL96 | 3558 | A-109523 | 210 | aGfaGfaGfgAfcAfgacCfcAfaAfaGfasUfsa |
| AD-53802 | A-110685 | 211 | UfuUfuGfgGfuCfUfGfuCfcUfcUfcUfgUfL96 | 3560 | A-109525 | 212 | aCfaGfaGfaGfgAfcagAfcCfcAfaAfasGfsa |
| AD-53808 | A-110686 | 213 | UfuUfgGfgUfcUfGfUfcCfuCfuCfuGfuUfL96 | 3561 | A-109527 | 214 | aAfcAfgAfgAfgGfacaGfaCfcCfaAfasAfsg |
| AD-53795 | A-110723 | 215 | UfuGfgGfuCfuGfUfCfcUfcUfcUfgUfuUfL96 | 3562 | A-109601 | 216 | aAfaCfaGfaGfaGfgacAfgAfcCfcAfasAfsa |
| AD-53801 | A-110724 | 217 | UfgGfgUfcUfgUfCfCfuCfuCfuGfuUfgAfL96 | 3563 | A-109603 | 218 | uCfaAfcAfgAfgAfggaCfaGfaCfcCfasAfsa |
| AD-53807 | A-110725 | 219 | GfgGfuCfuGfuCfCfUfcUfcUfgUfuGfcAfL96 | 3564 | A-109605 | 220 | uGfcAfaCfaGfaGfaggAfcAfgAfcCfcsAfsa |
| AD-53814 | A-110687 | 221 | GfgUfcUfgUfcCfUfCfuCfuGfuUfgCfcUfL96 | 3565 | A-109529 | 222 | aGfgCfaAfcAfgAfgagGfaCfaGfaCfcsCfsa |
| AD-53820 | A-110688 | 223 | GfuCfuGfuCfcUfCfUfcUfgUfuGfcCfuUfL96 | 3566 | A-109531 | 224 | aAfgGfcAfaCfaGfagaGfgAfcAfgAfcsCfsc |
| AD-53825 | A-110689 | 225 | UfcUfgUfcCfuCfUfCfuGfuUfgCfcUfuUfL96 | 3567 | A-109533 | 226 | aAfaGfgCfaAfcAfgagAfgGfaCfaGfasCfsc |
| AD-53831 | A-110690 | 227 | CfuGfuCfcUfcUfCfUfgUfuGfcCfuUfuUfL96 | 3568 | A-109535 | 228 | aAfaAfgGfcAfaCfagaGfaGfgAfcAfgsAfsc |
| AD-53791 | A-110691 | 229 | UfgUfcCfuCfuCfUfGfuUfgCfcUfuUfuUfL96 | 3569 | A-109537 | 230 | aAfaAfaGfgCfaAfcagAfgAfgGfaCfasGfsa |
| AD-53797 | A-110692 | 231 | GfuCfcUfcUfcUfGfUfuGfcCfuUfuUfuAfL96 | 3570 | A-109539 | 232 | uAfaAfaAfgGfcAfacaGfaGfaGfgAfcsAfsg |
| AD-58902 | | 233 | UfsusUfuCfuAfgAfCfCfuGfuUfuUfgCfuUfL96 | 3597 | | 234 | asAfsgCfaAfaAfcAfgguCfuAfgAfaAfasgsu |
| AD-53803 | A-110693 | 235 | UfuUfcUfaGfaCfCfUfgUfuUfuGfcUfuUfL96 | 3600 | A-109541 | 236 | aAfaGfcAfaAfaCfaggUfcUfaGfaAfasAfsg |
| AD-59232 | | 237 | CfsusAfgAfcCfuGfUfUfuUfgCfuUfuUfgUfL96 | 3600 | | 238 | PasCfsaAfaAfgCfaAfaacAfgGfuCfuAfgsasa |
| AD-59212 | | 239 | CfsusAfgAfcCfuGfUfUfuUfgCfuUfuUfgUfL96 | 3600 | | 240 | PasCfsaAfaAfsgCfaAfaacAfgGfuCfsuAfgsasa |
| AD-53809 | A-110694 | 241 | UfuCfuAfgAfcCfUfGfuUfuUfgCfuUfuUfL96 | 3601 | A-109543 | 242 | aAfaAfgCfaAfaAfcagGfuCfuAfgAfasAfsa |
| AD-53815 | | 243 | CfuAfgAfcCfuGfUfUfuUfgCfuUfuUfgUfL96 | 3601 | | 244 | aCfaAfaAfgCfaAfaacAfgGfuCfuAfgsAfsa |
| AD- | | 245 | CfsusAfgAfcCfuGfUfUfuUfgCfuUfuUfgUfL96 | 3601 | | 246 | asCfsaAfaAfgCfaAfaacAfgGfuCfuAfgsasa |
| 579280 | | | | | | | |
| AD-59182 | | 247 | CfsusAfgAfcCfuGfUfUfuugCfuuuuguL96 | 3601 | | 248 | asCfsaAfaAfgCfaAfaacAfgGfuCfuAfgsasa |
| AD-59184 | | 249 | CfsusAfgAfcCfuGfuUfuugCfuuuuguL96 | 3601 | | 250 | asCfsaAfaAfgCfaAfaacAfgGfuCfuAfgsasa |
| AD-59186 | | 251 | CfsusAfgAfcCfuGfUfuuugCfuuuuguL96 | 3601 | | 252 | asCfsaAfaAfgCfaAfaacAfgGfuCfuAfgsasa |
| AD-59171 | | 253 | CfsusAfgAfcCfuGfuuuugCfuuuuguL96 | 3601 | | 254 | asCfsaAfaAfgCfaAfaacAfgGfuCfuAfgsasa |
| AD-59176 | | 255 | CfsusAfgAfcCfuGfuuuugcuuuuguL96 | 3601 | | 256 | asCfsaAfaAfgCfaAfaacAfgGfuCfuAfgsasa |
| AD-59170 | | 257 | CfsusagacCfuGfuuuugCfuuuuguL96 | 3601 | | 258 | asCfsaAfaAfgCfaAfaacAfgGfuCfuAfgsasa |
| AD-59175 | | 259 | CfsusagacCfuGfuuuugcuuuuguL96 | 3601 | | 260 | asCfsaAfaAfgCfaAfaacAfgGfuCfuAfgsasa |
| AD-59179 | | 261 | csusagacCfuGfuuuugcuuuuguL96 | 3601 | | 262 | asCfsaAfaAfgCfaAfaacAfgGfuCfuAfgsasa |
| AD-59218 | | 263 | CfsusAfgAfcCfuGfuuuugCfuuuuguL96 | 3601 | | 264 | asCfsaAfaAfgCfaAfAfAfcAfgGfuCfuAfgsasa |
| AD-59222 | | 265 | CfsusAfgAfcCfuGfuuuugcuuuuguL96 | 3601 | | 266 | asCfsaAfaAfgCfaAfAfAfcAfgGfuCfuAfgsasa |
| AD-59226 | | 267 | CfsusagacCfuGfuuuugCfuuuuguL96 | 3601 | | 268 | asCfsaAfaAfgCfaAfAfAfcAfgGfuCfuAfgsasa |
| AD-59230 | | 269 | CfsusagacCfuGfuuuugcuuuuguL96 | 3601 | | 270 | asCfsaAfaAfgCfaAfAfAfcAfgGfuCfuAfgsasa |
| AD-59235 | | 271 | csusagacCfuGfuuuugcuuuuguL96 | 3601 | | 272 | asCfsaAfaAfgCfaAfAfAfcAfgGfuCfuAfgsasa |
| AD-59207 | | 273 | CfsusAfgAfcCfuGfuuuugCfuuuuguL96 | 3601 | | 274 | asCfsaAfAfAfgCfaAfaAfcAfgGfuCfuagsasa |
| AD-59211 | | 275 | CfsusAfgAfcCfuGfuuuugcuuuuguL96 | 3601 | | 276 | asCfsaAfAfAfgCfaAfaAfcAfgGfuCfuagsasa |
| AD-59215 | | 277 | CfsusagacCfuGfuuuugCfuuuuguL96 | 3601 | | 278 | asCfsaAfAfAfgCfaAfaAfcAfgGfuCfuagsasa |
| AD-59219 | | 279 | CfsusagacCfuGfuuuugcuuuuguL96 | 3601 | | 280 | asCfsaAfAfAfgCfaAfaAfcAfgGfuCfuagsasa |
| AD-59223 | | 281 | csusagacCfuGfuuuugcuuuuguL96 | 3601 | | 282 | asCfsaAfAfAfgCfaAfaAfcAfgGfuCfuagsasa |
| AD-59181 | | 283 | CfsusAfgAfcCfuGfUfUfuUfgCfuUfuUfgsUfL96 | 3601 | | 284 | asCfsaAfaAfgCfaAfaacAfgGfuCfuAfgsasa |
| AD-59172 | | 285 | CfsusAfgAfcCfuGfUfUfuUfgCfuUfuUfsgsUfL96 | 3601 | | 286 | asCfsaAfaAfgCfaAfaacAfgGfuCfuAfgsasa |
| AD-59177 | | 287 | CfsusAfgAfcCfuGfUfUfuUfgCfsuUfsuUfsgsUfL96 | 3601 | | 288 | asCfsaAfaAfgCfaAfaacAfgGfuCfuAfgsasa |
| AD-59180 | | 289 | CfsusAfgAfcCfuGfUfUfuUfgCfsuUfsuUfsgsUfsL96 | 3601 | | 290 | asCfsaAfaAfgCfaAfaacAfgGfuCfuAfgsasa |
| AD-59183 | | 291 | CfsusAfgAfcCfuGfUfUfuUfgCfuUfuUfsgsUfsL96 | 3601 | | 292 | asCfsaAfaAfgCfaAfaacAfgGfuCfuAfgsasa |
| AD-59185 | | 293 | CfsusAfgAfcCfuGfUfUfuUfgCfuUfuUfgUfsL96 | 3601 | | 294 | asCfsaAfaAfgCfaAfaacAfgGfuCfuAfgsasa |
| AD-59173 | | 295 | CfsusAfgAfcCfuGfUfUfuugCfuuuugsuL96 | 3601 | | 296 | asCfsaAfaAfgCfaAfaacAfgGfuCfuAfgsasa |
| AD-59236 | | 297 | CfsusAfgAfcCfuGfUfUfuUfgCfuUfuUfgUfL96 | 3601 | | 298 | asCfsaAfaAfsgCfaAfaacAfgGfuCfsuAfgsasa |
| AD-59216 | | 299 | CfsusAfgAfcCfuGfUfUfuUfgCfuUfuUfgsUfL96 | 3601 | | 300 | asCfsaAfaAfsgCfaAfaacAfgGfuCfsuAfgsasa |
| AD-59220 | | 301 | CfsusAfgAfcCfuGfUfUfuUfgCfuUfuUfsgsUfL96 | 3601 | | 302 | asCfsaAfaAfsgCfaAfaacAfgGfuCfsuAfgsasa |
| AD-59224 | | 303 | CfsusAfgAfcCfuGfUfUfuUfgCfsuUfsuUfsgsUfL96 | 3601 | | 304 | asCfsaAfaAfsgCfaAfaacAfgGfuCfsuAfgsasa |
| AD-59228 | | 305 | CfsusAfgAfcCfuGfUfUfuUfgCfsuUfsuUfsgsUfsL96 | 3601 | | 306 | asCfsaAfaAfsgCfaAfaacAfgGfuCfsuAfgsasa |
| AD-59233 | | 307 | CfsusAfgAfcCfuGfUfUfuUfgCfuUfuUfsgsUfsL96 | 3601 | | 308 | asCfsaAfaAfsgCfaAfaacAfgGfuCfsuAfgsasa |
| AD-59237 | | 309 | CfsusAfgAfcCfuGfUfUfuUfgCfuUfuUfgUfsL96 | 3601 | | 310 | asCfsaAfaAfsgCfaAfaacAfgGfuCfsuAfgsasa |
| AD-59209 | | 311 | CfsusAfgAfcCfuGfUfUfuugCfuuuugsuL96 | 3601 | | 312 | asCfsaAfaAfsgCfaAfaacAfgGfuCfsuAfgsasa |
| AD-59208 | | 313 | CfsusAfgAfcCfuGfUfUfuUfgCfuUfuUfgUfL96 | 3601 | | 314 | asCfsaAfaAfsgCfaAfaacAfgGfuCfsusAfgsasa |
| AD-59210 | | 315 | csusAGAccuGuuuuGcuuuuGuL96 | 3601 | | 316 | AscsAAAAGcAAAAcAGGucuAGsasa |
| AD-59227 | | 317 | CfsusAfGfAfccuGfuuuuGfcuuuuGfuL96 | 3601 | | 318 | asCfsAfAfAfAfGfcAfAfAfAfcAfGfGfucuAfGfsa |
| | | | | | | | sa |
| AD-59231 | | 319 | CfsusAfGfAfccuGfuuuuGfcuuuuGfuL96 | 3601 | | 320 | asCfsAfAfAfAfGfcAfAfaacAfGfGfucuAfGfsasa |
| AD-59198 | | 321 | (C3m)usAfgAfcCfuGfUfUfuUfgCfuUfuUfgUfL96 | 3601 | | 322 | asCfsaAfaAfgCfaAfaacAfgGfuCfuAfgsasa |
| AD-59200 | | 323 | (C3m)(U3m)AfgAfcCfuGfUfUfuUfgCfuUfuUfgUfL96 | 3601 | | 324 | asCfsaAfaAfgCfaAfaacAfgGfuCfuAfgsasa |
| AD-59203 | | 325 | (m5Cam)usAfgAfcCfuGfUfUfuUfgCfuUfuUfgUfL96 | 3601 | | 326 | asCfsaAfaAfgCfaAfaacAfgGfuCfuAfgsasa |
| AD-59204 | | 327 | (m5Cam)(Tam)AfgAfcCfuGfUfUfuUfgCfuUf | 3601 | | 328 | asCfsaAfaAfgCfaAfaacAfgGfuCfuAfgsasa |
| | | | uUfgUfL96 | | | | |
| AD-59188 | | 329 | (m5Cams)(Tams)AfgAfcCfuGfUfUfuUfgCfu | 3601 | | 330 | asCfsaAfaAfgCfaAfaacAfgGfuCfuAfgsasa |
| | | | UfuUfgUfL96 | | | | |
| AD-59191 | | 331 | (m5Cams)usAfgAfcCfuGfUfUfuUfgCfuUfuUfgUfL96 | 3601 | | 332 | asCfsaAfaAfgCfaAfaacAfgGfuCfuAfgsasa |
| AD-59213 | | 333 | CfsusAfgAfcCfuGfUfUfuUfgCfuUfuUfgUfL96 | 3601 | | 334 | asCfsaAfaAfgCfaAfaacAfgGfuCfuAfgs(A3m)a |
| AD-59217 | | 335 | CfsusAfgAfcCfuGfUfUfuUfgCfuUfuUfgUfL96 | 3601 | | 336 | asCfsaAfaAfgCfaAfaacAfgGfuCfuAf(G3m) |
| | | | | | | | (A3m)a |
| AD-59221 | | 337 | CfsusAfgAfcCfuGfUfUfuUfgCfuUfuUfgUfL96 | 3601 | | 338 | asCfsaAfaAfgCfaAfaacAfgGfuCfuAfgs(Aam)a |
| AD-59225 | | 339 | CfsusAfgAfcCfuGfUfUfuUfgCfuUfuUfgUfL96 | 3601 | | 340 | asCfsaAfaAfgCfaAfaacAfgGfuCfuAf(Gam) |
| | | | | | | | (Aam)a |
| AD-59229 | | 341 | CfsusAfgAfcCfuGfUfUfuUfgCfuUfuUfgUfL96 | 3601 | | 342 | asCfsaAfaAfgCfaAfaacAfgGfuCfuAfgs(Aams)a |
| AD-59234 | | 343 | CfsusAfgAfcCfuGfUfUfuUfgCfuUfuUfgUfL96 | 3601 | | 344 | asCfsaAfaAfgCfaAfaacAfgGfuCfuAf(Gams) |
| | | | | | | | (Aams)a |
| AD-59238 | | 345 | CfsusAfgAfcCfuGfUfUfuUfgCfuUfuUfgUfL96 | 3601 | | 346 | (A3m)CfsaAfaAfgCfaAfaacAfgGfuCfuAfgsasa |
| AD-59241 | | 347 | CfsusAfgAfcCfuGfUfUfuUfgCfuUfuUfgUfL96 | 3601 | | 348 | as(C3m)aAfaAfgCfaAfaacAfgGfuCfuAfgsasa |
| AD-59245 | | 349 | CfsusAfgAfcCfuGfUfUfuUfgCfuUfuUfgUfL96 | 3601 | | 350 | (Aam)CfsaAfaAfgCfaAfaacAfgGfuCfuAfgsasa |
| AD-59250 | | 351 | CfsusAfgAfcCfuGfUfUfuUfgCfuUfuUfgUfL96 | 3601 | | 352 | as(m5Cam)aAfaAfgCfaAfaacAfgGfuCfuAfgsa |
| | | | | | | | sa |
| AD-59196 | | 353 | usAfsgAfcCfuGfUfUfuUfgCfuUfuUfgUfL96 | 3601 | | 354 | asCfsaAfaAfgCfaAfaacAfgGfuCfuAfgsasa |
| AD-59189 | | 355 | AfsgsAfcCfuGfUfUfuUfgCfuUfuUfgUfL96 | 3601 | | 356 | asCfsaAfaAfgCfaAfaacAfgGfuCfuAfgsasa |
| AD-59190 | | 357 | usCfsuAfgAfcCfuGfUfUfuUfgCfuUfuUfgUfL96 | 3601 | | 358 | asCfsaAfaAfgCfaAfaacAfgGfuCfuAfgsasa |
| AD-59192 | | 359 | UfsusCfuAfgAfcCfuGfUfUfuUfgCfuUfuUfgUfL96 | 3601 | | 360 | asCfsaAfaAfgCfaAfaacAfgGfuCfuAfgsasa |
| AD-59240 | | 361 | CfsusAfgAfcCfuGfuuuugCfuuuuguL96 | 3601 | | 362 | asCfsaAfaAfsgCfaAfaacAfgGfuCfuAfgs(A3m) |
| | | | | | | | a |
| AD-59244 | | 363 | CfsusAfgAfcCfuGfuuuugCfuuuuguL96 | 3601 | | 364 | asCfsaAfaAfsgCfaAfaacAfgGfuCfuAfgsasa |
| AD- | | 365 | (C3m)usagaccuguuuugcuuuuguL96 | 3601 | | 366 | asCfsaAfaAfgCfaAfaacAfgGfuCfuAfgsasa |
| 59202.7 | | | | | | | |
| AD-59195 | | 367 | (C3m)usAfgAfcCfuGfuuuugCfuuuuguL96 | 3601 | | 368 | asCfsaAfaAfgCfaAfaacAfgGfuCfuAfgsasa |
| AD-59249 | | 369 | CfsusAfgAfcCfuGfUfUfuugCfuuuuguL96 | 3601 | | 370 | asCfsaAfaAfgCfaAfaacAfgGfuCfuAfgs(A3m)a |
| AD-59254 | | 371 | CfsusAfgAfcCfuGfuuuugCfuuuuguL96 | 3601 | | 372 | asCfsaAfaAfgCfaAfaacAfgGfuCfuAfgs(A3m)a |
| AD-59259 | | 373 | (C3m)usAfgAfcCfuGfuuuugCfuuuuguL96 | 3601 | | 374 | asCfsaAfaAfgCfaAfaacAfgGfuCfuAfgs(A3m)a |
| AD-59264 | | 375 | (C3m)usagaccuguuuugcuuuuguL96 | 3601 | | 376 | asCfsaAfaAfgCfaAfaacAfgGfuCfuAfgs(A3m)a |
| AD-59264 | | 377 | (C3m)usagaccuguuuugcuuuuguL96 | 3601 | | 378 | asCfsaAfaAfgCfaAfaacAfgGfuCfuAfgs(A3m)a |
| AD-59255 | | 379 | CsusagaccuGfUfUfuugcuuuuguL96 | 3601 | | 380 | asCfsaAfaAfgCfaAfaacAfgGfuCfuAfgs(A3m)a |
| AD-57928 | | 381 | CfsusAfgAfcCfuGfUfUfuUfgCfuUfuUfgUfL96 | 3601 | | 382 | asCfsaAfaAfgCfaAfaacAfgGfuCfuAfgsasa |
| AD-58893 | | 383 | CfsuAfgAfcCfuGfUfUfuUfgCfuUfuUfgUfL96 | 3601 | | 384 | asCfaAfaAfgCfaAfaacAfgGfuCfuAfgasa |
| AD-58894 | | 385 | CfusAfgAfcCfuGfUfUfuUfgCfuUfuUfgUfL96 | 3601 | | 386 | aCfsaAfaAfgCfaAfaacAfgGfuCfuAfgsaa |
| AD-58895 | | 387 | CfuAfgAfcCfuGfUfUfuUfgCfuUfuUfgUfL96 | 3601 | | 388 | asCfsaAfaAfgCfaAfaacAfgGfuCfuAfgsasa |
| AD-58896 | | 389 | CfsusAfgAfcCfuGfUfUfuUfgCfuUfuUfgUfL96 | 3601 | | 390 | aCfaAfaAfgCfaAfaacAfgGfuCfuAfgaa |
| AD-58897 | | 391 | CfsusAfsgAfcCfuGfUfUfuUfgCfuUfuUfgUfL96 | 3601 | | 392 | asCfsasAfaAfgCfaAfaacAfgGfuCfuAfsgsasa |
| AD-58898 | | 393 | CfsusAfsgAfcCfuGfUfUfuUfgCfuUfuUfgUfL96 | 3601 | | 394 | asCfsaAfaAfgCfsaAfaacAfsgGfuCfuAfsgsasa |
| AD-58899 | | 395 | CfsusAfsgAfcCfuGfUfUfuUfgCfuUfuUfsgUfL96 | 3601 | | 396 | asCfsaAfaAfgCfsaAfaacAfsgGfuCfuAfsgsasa |
| AD-53813 | A-110726 | 397 | UfcUfaGfaCfcUfGfUfuUfuGfcUfuUfuUfL96 | 3602 | A-109607 | 398 | aAfaAfaGfcAfaAfacaGfgUfcUfaGfasAfsa |
| AD-59246 | | 399 | CfsusAfgAfcCfuGfUfUfuUfgCfuUfuUfgUfL96 | 3602 | | 400 | asCfsaAfaAfgCfaAfaacAfgGfuCfuAfsgsa |
| AD-59253 | | 401 | usAfsgAfcCfuGfUfUfuUfgCfuUfuUfgUfL96 | 3602 | | 402 | asCfsaAfaAfgCfaAfaacAfgGfuCfuAfsgsa |
| AD-59242 | | 403 | AfsgsAfcCfuGfUfUfuUfgCfuUfuUfgUfL96 | 3602 | | 404 | asCfsaAfaAfgCfaAfaacAfgGfuCfuAfsgsa |
| AD-59253 | | 405 | usAfsgAfcCfuGfUfUfuUfgCfuUfuUfgUfL96 | 3602 | | 406 | asCfsaAfaAfgCfaAfaacAfgGfuCfuAfsgsa |
| AD-59258 | | 407 | usasgAfcCfuGfUfUfuUfgCfuUfuUfgUfL96 | 3602 | | 408 | asCfsaAfaAfgCfaAfaacAfgGfuCfuAfsgsa |
| AD-53815 | A-110695 | 409 | CfuAfgAfcCfuGfUfUfuUfgCfuUfuUfgUfL96 | 3603 | A-109545 | 410 | aCfaAfaAfgCfaAfaacAfgGfuCfuAfgsAfsa |
| AD-53815 | A-110695 | 411 | CfuAfgAfcCfuGfUfUfuUfgCfuUfuUfgUfL96 | 3603 | A-109545 | 412 | aCfaAfaAfgCfaAfaacAfgGfuCfuAfgsAfsa |
| AD-53815 | A-110695 | 413 | CfuAfgAfcCfuGfUfUfuUfgCfuUfuUfgUfL96 | 3603 | A-109545 | 414 | aCfaAfaAfgCfaAfaacAfgGfuCfuAfgsAfsa |
| AD-56633 | A-115520 | 415 | cuAfgAfcCfuGfUfUfuUfgCfuUfuUfgUfL96 | 3603 | A-109545 | 416 | aCfaAfaAfgCfaAfaacAfgGfuCfuAfgsAfsa |
| AD-56617 | A-115535 | 417 | CfuagAfcCfuGfUfUfuUfgCfuUfuUfgUfL96 | 3603 | A-109545 | 418 | aCfaAfaAfgCfaAfaacAfgGfuCfuAfgsAfsa |
| AD-56623 | A-115536 | 419 | CfuagAfcCfuGfUfUfuUfgcuUfuUfguL96 | 3603 | A-109545 | 420 | aCfaAfaAfgCfaAfaacAfgGfuCfuAfgsAfsa |
| AD-56629 | A-115537 | 421 | CfuagAfccuGfUfUfuUfgcuUfuUfguL96 | 3603 | A-109545 | 422 | aCfaAfaAfgCfaAfaacAfgGfuCfuAfgsAfsa |
| AD-56635 | A-115538 | 423 | CfuagAfccuGfUfUfuugcuUfuuguL96 | 3603 | A-109545 | 424 | aCfaAfaAfgCfaAfaacAfgGfuCfuAfgsAfsa |
| AD-56641 | A-115539 | 425 | CfuagaccuGfUfUfuugcuuuuguL96 | 3603 | A-109545 | 426 | aCfaAfaAfgCfaAfaacAfgGfuCfuAfgsAfsa |
| AD-56625 | A-115542 | 427 | CfuAfGfAfcCfuGfUfUfuUfgCfuUfuUfgUfL96 | 3603 | A-109545 | 428 | aCfaAfaAfgCfaAfaacAfgGfuCfuAfgsAfsa |
| AD-56631 | A-115543 | 429 | CfuAfGfAfcCfuGfUfUfuUfGfCfuUfuUfgUfL96 | 3603 | A-109545 | 430 | aCfaAfaAfgCfaAfaacAfgGfuCfuAfgsAfsa |
| AD-56637 | A-115544 | 431 | CfuAfGfAfcCfuGfUfUfuUfGfCfuUfUfUfgUfL96 | 3603 | A-109545 | 432 | aCfaAfaAfgCfaAfaacAfgGfuCfuAfgsAfsa |
| AD-56643 | A-115545 | 433 | CfuAfGfAfCfCfuGfUfUfuUfGfCfuUfUfUfGfUfL96 | 3603 | A-109545 | 434 | aCfaAfaAfgCfaAfaacAfgGfuCfuAfgsAfsa |
| AD-56649 | A-115546 | 435 | CfUfAfGfAfCfCfuGfUfUfuUfGfCfUfUfUfUfGfUfL96 | 3603 | A-109545 | 436 | aCfaAfaAfgCfaAfaacAfgGfuCfuAfgsAfsa |
| AD-56655 | A-115547 | 437 | CfUfAfGfAfCfCfUfGfUfUfUfUfGfCfUfUfUfUfGf | 3603 | A-109545 | 438 | aCfaAfaAfgCfaAfaacAfgGfuCfuAfgsAfsa |
| | | | UfL96 | | | | |
| AD-56615 | A-110695 | 439 | CfuAfgAfcCfuGfUfUfuUfgCfuUfuUfgUfL96 | 3603 | A-115519 | 440 | acaAfaAfgcaAfaacAfgGfuCfuAfgsAfsa |
| AD-56621 | A-115520 | 441 | cuAfgAfcCfuGfUfUfuUfgCfuUfuUfgUfL96 | 3603 | A-115519 | 442 | acaAfaAfgcaAfaacAfgGfuCfuAfgsAfsa |
| AD-56627 | A-115521 | 443 | cuAfgAfcCfuGfUfUfuugCfuUfuugUfL96 | 3603 | A-115519 | 444 | acaAfaAfgcaAfaacAfgGfuCfuAfgsAfsa |
| AD-56639 | A-115520 | 445 | cuAfgAfcCfuGfUfUfuUfgCfuUfuUfgUfL96 | 3603 | A-115522 | 446 | ACfaAfaAfgCfaAfaacAfgGfuCfuAfgsAfsa |
| AD-56645 | A-110695.6 | 447 | CfuAfgAfcCfuGfUfUfuUfgCfuUfuUfgUfL96 | 3603 | A-115522 | 448 | ACfaAfaAfgCfaAfaacAfgGfuCfuAfgsAfsa |
| AD-56651 | A-115523 | 449 | (iC)uAfgAfcCfuGfUfUfuUfgCfuUfuUfgUfL96 | 3603 | A-115524 | 450 | (iA)CfaAfaAfgCfaAfaacAfgGfuCfuAfgsAfs(iA) |
| AD-56610 | A-115523 | 451 | (iC)uAfgAfcCfuGfUfUfuUfgCfuUfuUfgUfL96 | 3603 | A-115525 | 452 | aCfaAfaAfgCfaAfaacAfgGfuCfuAfgsAfs(iA) |
| AD-56616 | A-115523 | 453 | (iC)uAfgAfcCfuGfUfUfuUfgCfuUfuUfgUfL96 | 3603 | A-115526 | 454 | acaAfaAfgcaAfaacAfgGfuCfuAfgsAfs(iA) |
| AD-56622 | A-115527 | 455 | (iC)uAfgAfcCfuGfUfUfuUfgCfuUfuugUfL96 | 3603 | A-115526 | 456 | acaAfaAfgcaAfaacAfgGfuCfuAfgsAfs(iA) |
| AD-56628 | A-115527 | 457 | (iC)uAfgAfcCfuGfUfUfuUfgCfuUfuugUfL96 | 3603 | A-115528 | 458 | (iA)caAfaAfgcaAfaacAfgGfuCfuAfgsAfs(iA) |
| AD-56634 | A-115529 | 459 | CbuAfgAfcCfuGfUfUfuUfgCfuUfuUfgUfL96 | 3603 | A-115530 | 460 | AbCfaAfaAfgCfaAfaacAfgGfuCfuAfgsAfsAb |
| AD-56640 | A-115529 | 461 | CbuAfgAfcCfuGfUfUfuUfgCfuUfuUfgUfL96 | 3603 | A-115531 | 462 | aCfaAfaAfgCfaAfaacAfgGfuCfuAfgsAfsAb |
| AD-56646 | A-115529 | 463 | CbuAfgAfcCfuGfUfUfuUfgCfuUfuUfgUfL96 | 3603 | A-115532 | 464 | acaAfaAfgcaAfaacAfgGfuCfuAfgsAfsAb |
| AD-56652 | A-115533 | 465 | CbuAfgAfcCfuGfUfUfuUfgCfuUfuugUfL96 | 3603 | A-115532 | 466 | acaAfaAfgcaAfaacAfgGfuCfuAfgsAfsAb |
| AD-56611 | A-115533 | 467 | CbuAfgAfcCfuGfUfUfuUfgCfuUfuugUfL96 | 3603 | A-115534 | 468 | (iA)caAfaAfgcaAfaacAfgGfuCfuAfgsAfsAb |
| AD-56647 | A-110695.7 | 469 | CfuAfgAfcCfuGfUfUfuUfgCfuUfuUfgUfL96 | 3603 | A-115540 | 470 | aCfaaaAfgCfaAfaacAfgGfuCfuAfgsasa |
| AD-56653 | A-115535 | 471 | CfuagAfcCfuGfUfUfuUfgCfuUfuUfgUfL96 | 3603 | A-115540 | 472 | aCfaaaAfgCfaAfaacAfgGfuCfuAfgsasa |
| AD-56612 | A-115536 | 473 | CfuagAfcCfuGfUfUfuUfgcuUfuUfguL96 | 3603 | A-115540 | 474 | aCfaaaAfgCfaAfaacAfgGfuCfuAfgsasa |
| AD-56618 | A-115537 | 475 | CfuagAfccuGfUfUfuUfgcuUfuUfguL96 | 3603 | A-115540 | 476 | aCfaaaAfgCfaAfaacAfgGfuCfuAfgsasa |
| AD-56624 | A-115538 | 477 | CfuagAfccuGfUfUfuugcuUfuuguL96 | 3603 | A-115540 | 478 | aCfaaaAfgCfaAfaacAfgGfuCfuAfgsasa |
| AD-56630 | A-115539 | 479 | CfuagaccuGfUfUfuugcuuuuguL96 | 3603 | A-115540 | 480 | aCfaaaAfgCfaAfaacAfgGfuCfuAfgsasa |
| AD-56636 | A-110695.8 | 481 | CfuAfgAfcCfuGfUfUfuUfgCfuUfuUfgUfL96 | 3603 | A-115541 | 482 | aCfaaaAfgCfaAfaacAfgguCfuAfgsasa |
| AD-56642 | A-115535 | 483 | CfuagAfcCfuGfUfUfuUfgCfuUfuUfgUfL96 | 3603 | A-115541 | 484 | aCfaaaAfgCfaAfaacAfgguCfuAfgsasa |
| AD-56648 | A-115536 | 485 | CfuagAfcCfuGfUfUfuUfgcuUfuUfguL96 | 3603 | A-115541 | 486 | aCfaaaAfgCfaAfaacAfgguCfuAfgsasa |
| AD-56654 | A-115537 | 487 | CfuagAfccuGfUfUfuUfgcuUfuUfguL96 | 3603 | A-115541 | 488 | aCfaaaAfgCfaAfaacAfgguCfuAfgsasa |
| AD-56613 | A-115538 | 489 | CfuagAfccuGfUfUfuugcuUfuuguL96 | 3603 | A-115541 | 490 | aCfaaaAfgCfaAfaacAfgguCfuAfgsasa |
| AD-56619 | A-115539 | 491 | CfuagaccuGfUfUfuugcuuuuguL96 | 3603 | A-115541 | 492 | aCfaaaAfgCfaAfaacAfgguCfuAfgsasa |
| AD-56614 | A-110695.9 | 493 | CfuAfgAfcCfuGfUfUfuUfgCfuUfuUfgUfL96 | 3603 | A-115548 | 494 | aCfaAfAfAfgCfaAfaacAfgGfUfCfuAfgsAfsa |
| AD-56620 | A-115542 | 495 | CfuAfGfAfcCfuGfUfUfuUfgCfuUfuUfgUfL96 | 3603 | A-115548 | 496 | aCfaAfAfAfgCfaAfaacAfgGfUfCfuAfgsAfsa |
| AD-56626 | A-115543 | 497 | CfuAfGfAfcCfuGfUfUfuUfGfCfuUfuUfgUfL96 | 3603 | A-115548 | 498 | aCfaAfAfAfgCfaAfaacAfgGfUfCfuAfgsAfsa |
| AD-56632 | A-115544 | 499 | CfuAfGfAfcCfuGfUfUfuUfGfCfuUfUfUfgUfL96 | 3603 | A-115548 | 500 | aCfaAfAfAfgCfaAfaacAfgGfUfCfuAfgsAfsa |
| AD-56638 | A-115545 | 501 | CfuAfGfAfCfCfuGfUfUfuUfGfCfuUfUfUfGfUfL96 | 3603 | A-115548 | 502 | aCfaAfAfAfgCfaAfaacAfgGfUfCfuAfgsAfsa |
| AD-56644 | A-115546 | 503 | CfUfAfGfAfCfCfuGfUfUfuUfGfCfUfUfUfUfGfUfL96 | 3603 | A-115548 | 504 | aCfaAfAfAfgCfaAfaacAfgGfUfCfuAfgsAfsa |
| AD-56650 | A-115547 | 505 | CfUfAfGfAfCfCfUfGfUfUfUfUfGfCfUfUfUfUfGf | 3603 | A-115548 | 506 | aCfaAfAfAfgCfaAfaacAfgGfUfCfuAfgsAfsa |
| | | | UfL96 | | | | |
| AD-56656 | A-110695 | 507 | CfuAfgAfcCfuGfUfUfuUfgCfuUfuUfgUfL96 | 3603 | A-115549 | 508 | aCfaAfAfAfGfCfaAfaacAfgGfUfCfuAfgsAfsa |
| AD-56662 | A-115542 | 509 | CfuAfGfAfcCfuGfUfUfuUfgCfuUfuUfgUfL96 | 3603 | A-115549 | 510 | aCfaAfAfAfGfCfaAfaacAfgGfUfCfuAfgsAfsa |
| AD-56668 | A-115543 | 511 | CfuAfGfAfcCfuGfUfUfuUfGfCfuUfuUfgUfL96 | 3603 | A-115549 | 512 | aCfaAfAfAfGfCfaAfaacAfgGfUfCfuAfgsAfsa |
| AD-56673 | A-115544 | 513 | CfuAfGfAfcCfuGfUfUfuUfGfCfuUfUfUfgUfL96 | 3603 | A-115549 | 514 | aCfaAfAfAfGfCfaAfaacAfgGfUfCfuAfgsAfsa |
| AD-56678 | A-115545 | 515 | CfuAfGfAfCfCfuGfUfUfuUfGfCfuUfUfUfGfUfL96 | 3603 | A-115549 | 516 | aCfaAfAfAfGfCfaAfaacAfgGfUfCfuAfgsAfsa |
| AD-56683 | A-115546 | 517 | CfUfAfGfAfCfCfuGfUfUfuUfGfCfUfUfUfUfGfUfL96 | 3603 | A-115549 | 518 | aCfaAfAfAfGfCfaAfaacAfgGfUfCfuAfgsAfsa |
| AD-56688 | A-115547 | 519 | CfUfAfGfAfCfCfUfGfUfUfUfUfGfCfUfUfUfUfGf | 3603 | A-115549 | 520 | aCfaAfAfAfGfCfaAfaacAfgGfUfCfuAfgsAfsa |
| | | | UfL96 | | | | |
| AD-56657 | A-115550 | 521 | CfuAfgAfcCfuGfUfUfuUfgCfuUfuugUfL96 | 3603 | A-115551 | 522 | aCfAfAfaAfgCfaAfaacAfgGfuCfuAfgsAfsa |
| AD-56663 | A-115552 | 523 | CfuAfgAfcCfuGfUfUfuUfgCfuuuUfgUfL96 | 3603 | A-115553 | 524 | aCfaAfAfAfgCfaAfaacAfgGfuCfuAfgsAfsa |
| AD-56669 | A-115554 | 525 | CfuAfgAfcCfuGfUfUfuUfgcuUfuUfgUfL96 | 3603 | A-115555 | 526 | aCfaAfaAfGfCfaAfaacAfgGfuCfuAfgsAfsa |
| AD-56674 | A-115556 | 527 | CfuAfgAfcCfuGfUfUfuugCfuUfuUfgUfL96 | 3603 | A-115557 | 528 | aCfaAfaAfgCfAfAfaacAfgGfuCfuAfgsAfsa |
| AD-56679 | A-115558 | 529 | CfuAfgAfccuGfUfUfuUfgCfuUfuUfgUfL96 | 3603 | A-115559 | 530 | aCfaAfaAfgCfaAfaacAfGfGfuCfuAfgsAfsa |
| AD-56684 | A-115560 | 531 | CfuAfgacCfuGfUfUfuUfgCfuUfuUfgUfL96 | 3603 | A-115561 | 532 | aCfaAfaAfgCfaAfaacAfgGfUfCfuAfgsAfsa |
| AD-56689 | A-115535 | 533 | CfuagAfcCfuGfUfUfuUfgCfuUfuUfgUfL96 | 3603 | A-115562 | 534 | aCfaAfaAfgCfaAfaacAfgGfuCfUfAfgsAfsa |
| AD-56693 | A-115520 | 535 | cuAfgAfcCfuGfUfUfuUfgCfuUfuUfgUfL96 | 3603 | A-115563 | 536 | aCfaAfaAfgCfaAfaacAfgGfuCfuAfGfsAfsa |
| AD-56658 | A-115564 | 537 | CfuAfgAfcCfuGfUfUfuUfgCfuUfUfUfgUfL96 | 3603 | A-115565 | 538 | aCfaaaAfgCfaAfaacAfgGfuCfuAfgsAfsa |
| AD-56664 | A-115566 | 539 | CfuAfgAfcCfuGfUfUfuUfgCfUfUfuUfgUfL96 | 3603 | A-115567 | 540 | aCfaAfaagCfaAfaacAfgGfuCfuAfgsAfsa |
| AD-56670 | A-115568 | 541 | CfuAfgAfcCfuGfUfUfuUfGfCfuUfuUfgUfL96 | 3603 | A-115569 | 542 | aCfaAfaAfgcaAfaacAfgGfuCfuAfgsAfsa |
| AD-56680 | A-115572 | 543 | CfuAfgAfcCfUfGfUfUfuUfgCfuUfuUfgUfL96 | 3603 | A-115573 | 544 | aCfaAfaAfgCfaAfaacagGfuCfuAfgsAfsa |
| AD-56685 | A-115574 | 545 | CfuAfgAfCfCfuGfUfUfuUfgCfuUfuUfgUfL96 | 3603 | A-115575 | 546 | aCfaAfaAfgCfaAfaacAfgguCfuAfgsAfsa |
| AD-56690 | A-115542 | 547 | CfuAfGfAfcCfuGfUfUfuUfgCfuUfuUfgUfL96 | 3603 | A-115576 | 548 | aCfaAfaAfgCfaAfaacAfgGfucuAfgsAfsa |
| AD-56694 | A-115577 | 549 | CfUfAfgAfcCfuGfUfUfuUfgCfuUfuUfgUfL96 | 3603 | A-115578 | 550 | aCfaAfaAfgCfaAfaacAfgGfuCfuagsAfsa |
| AD-56659 | A-110695 | 551 | CfuAfgAfcCfuGfUfUfuUfgCfuUfuUfgUfL96 | 3603 | A-115579 | 552 | aCfaAfaAfgCfaAfaacAfgGfuCfuAfgsasa |
| AD-59214 | | 553 | AsGsAccuGuuuuGcuuuuGuL96 | 3603 | | 554 | AscsAAAAGcAAAAcAGGucusAsG |
| AD-59251 | | 555 | CfsusAfgAfcCfuGfUfUfuUfgCfuUfuUfgUfL96 | 3603 | | 556 | asCfsaAfaAfgCfaAfaacAfgGfuCfusAfsg |
| AD-59261 | | 557 | AfsgsAfcCfuGfUfUfuUfgCfuUfuUfgUfL96 | 3603 | | 558 | asCfsaAfaAfgCfaAfaacAfgGfuCfusasg |
| AD-59262 | | 559 | usAfsgAfcCfuGfUfUfuUfgCfuUfuUfgUfL96 | 3603 | | 560 | asCfsaAfaAfgCfaAfaacAfgGfuCfusasg |
| AD-59265 | | 561 | csusAfgAfcCfuGfUfUfuUfgCfuUfuUfgUfL96 | 3603 | | 562 | asCfsaAfaAfgCfaAfaacAfgGfuCfusasg |
| AD-53821 | A-110696 | 563 | UfaGfaCfcUfgUfUfUfuGfcUfuUfuGfuAfL96 | 3604 | A-109547 | 564 | uAfcAfaAfaGfcAfaaaCfaGfgUfcUfasGfsa |
| AD-59256 | | 565 | usAfsgAfcCfuGfUfUfuUfgCfuUfuUfgUfL96 | 3604 | | 566 | asCfsaAfaAfgCfaAfaacAfgGfuCfsusAf |
| AD-59247 | | 567 | gsAfscCfuGfUfUfuUfgCfuUfuUfgUfL96 | 3604 | | 568 | asCfsaAfaAfgCfaAfaacAfgGfuCfsusa |
| AD-59252 | | 569 | AfsgsAfcCfuGfUfUfuUfgCfuUfuUfgUfL96 | 3604 | | 570 | asCfsaAfaAfgCfaAfaacAfgGfuCfsusa |
| AD-59257 | | 571 | usAfsgAfcCfuGfUfUfuUfgCfuUfuUfgUfL96 | 3604 | | 572 | asCfsaAfaAfgCfaAfaacAfgGfuCfsusa |
| AD-56665 | A-115580 | 573 | AfgAfcCfuGfUfUfuUfgCfuUfuUfgUfL96 | 3605 | A-115581 | 574 | aCfaAfaAfgCfaAfaacAfgGfuCfusAfsg |
| AD-56671 | A-115582 | 575 | AfgAfcCfuGfUfUfuUfgCfuUfuugUfL96 | 3605 | A-115583 | 576 | aCfAfAfaAfgCfaAfaacAfgGfuCfusAfsg |
| AD-56676 | A-115584 | 577 | AfgAfcCfuGfUfUfuUfgCfuuuUfgUfL96 | 3605 | A-115585 | 578 | aCfaAfAfAfgCfaAfaacAfgGfuCfusAfsg |
| AD-56681 | A-115586 | 579 | AfgAfcCfuGfUfUfuUfgcuUfuUfgUfL96 | 3605 | A-115587 | 580 | aCfaAfaAfGfCfaAfaacAfgGfuCfusAfsg |
| AD-56686 | A-115588 | 581 | AfgAfcCfuGfUfUfuugCfuUfuUfgUfL96 | 3605 | A-115589 | 582 | aCfaAfaAfgCfAfAfaacAfgGfuCfusAfsg |
| AD-56691 | A-115590 | 583 | AfgAfccuGfUfUfuUfgCfuUfuUfgUfL96 | 3605 | A-115591 | 584 | aCfaAfaAfgCfaAfaacAfGfGfuCfusAfsg |
| AD-56695 | A-115592 | 585 | AfgacCfuGfUfUfuUfgCfuUfuUfgUfL96 | 3605 | A-115593 | 586 | aCfaAfaAfgCfaAfaacAfgGfUfCfusAfsg |
| AD-56660 | A-115594 | 587 | agAfcCfuGfUfUfuUfgCfuUfuUfgUfL96 | 3605 | A-115595 | 588 | aCfaAfaAfgCfaAfaacAfgGfuCfUfsAfsg |
| AD-56666 | A-115596 | 589 | AfgAfcCfuGfUfUfuUfgCfuUfUfUfgUfL96 | 3605 | A-115597 | 590 | aCfaaaAfgCfaAfaacAfgGfuCfusAfsg |
| AD-56672 | A-115598 | 591 | AfgAfcCfuGfUfUfuUfgCfUfUfuUfgUfL96 | 3605 | A-115599 | 592 | aCfaAfaagCfaAfaacAfgGfuCfusAfsg |
| AD-56677 | A-115600 | 593 | AfgAfcCfuGfUfUfuUfGfCfuUfuUfgUfL96 | 3605 | A-115601 | 594 | aCfaAfaAfgcaAfaacAfgGfuCfusAfsg |
| AD-56682 | A-115602 | 595 | AfgAfcCfuGfUfUfUfUfgCfuUfuUfgUfL96 | 3605 | A-115603 | 596 | aCfaAfaAfgCfaaaacAfgGfuCfusAfsg |
| AD-56687 | A-115604 | 597 | AfgAfcCfUfGfUfUfuUfgCfuUfuUfgUfL96 | 3605 | A-115605 | 598 | aCfaAfaAfgCfaAfaacagGfuCfusAfsg |
| AD-56692 | A-115606 | 599 | AfgAfCfCfuGfUfUfuUfgCfuUfuUfgUfL96 | 3605 | A-115607 | 600 | aCfaAfaAfgCfaAfaacAfgguCfusAfsg |
| AD-56696 | A-115608 | 601 | AfGfAfcCfuGfUfUfuUfgCfuUfuUfgUfL96 | 3605 | A-115609 | 602 | aCfaAfaAfgCfaAfaacAfgGfucusAfsg |
| AD-56661 | A-115580 | 603 | AfgAfcCfuGfUfUfuUfgCfuUfuUfgUfL96 | 3605 | A-115610 | 604 | aCfaAfaAfgCfaAfaacAfgGfuCfusasg |
| AD-56667 | A-115611 | 605 | gAfcCfuGfUfUfuUfgCfuUfuUfgUfL96 | 3605 | A-115612 | 606 | aCfaAfaAfgCfaAfaacAfgGfuCfausa |
| AD-59260 | | 607 | AfsgsAfcCfuGfUfUfuUfgCfuUfuUfgUfL96 | 3605 | | 608 | asCfsaAfaAfgCfaAfaacAfgGfusCfsu |
| AD-59248 | | 609 | gsAfscCfuGfUfUfuUfgCfuUfuUfgUfL96 | 3605 | | 610 | asCfsaAfaAfgCfaAfaacAfgGfusCfsu |
| AD-53826 | A-110697 | 611 | UfuUfuGfuAfaCfUfUfgAfaGfaUfaUfuUfL96 | 3618 | A-109549 | 612 | aAfaUfaUfcUfuCfaagUfuAfcAfaAfasGfsc |
| AD-53832 | A-110698 | 613 | UfuUfgUfaAfcUfUfGfaAfgAfuAfuUfuAfL96 | 3619 | A-109551 | 614 | uAfaAfuAfuCfuUfcaaGfuUfaCfaAfasAfsg |
| AD-53792 | A-110699 | 615 | UfuGfuAfaCfuUfGfAfaGfaUfaUfuUfaUfL96 | 3620 | A-109553 | 616 | aUfaAfaUfaUfcUfucaAfgUfuAfcAfasAfsa |
| AD-53798 | A-110700 | 617 | UfgUfaAfcUfuGfAfAfgAfuAfuUfuAfuUfL96 | 3621 | A-109555 | 618 | aAfuAfaAfuAfuCfuucAfaGfuUfaCfasAfsa |
| AD-53819 | A-110727 | 619 | GfuAfaCfuUfgAfAfGfaUfaUfuUfaUfuUfL96 | 3622 | A-109609 | 620 | aAfaUfaAfaUfaUfcuuCfaAfgUfuAfcsAfsa |
| AD- | A-117428 | 621 | CfsusAfgAfcCfuGfUfUfuUfgCfuUfuUfgUfL96 | 3602 | A-117429 | 622 | asCfsaAfaAfgCfaAfaacAfgGfuCfuAfgsasa |
| 579285 | | | | | | | |
| AD-60928 | A-122701 | 623 | CfsusAfgAfcCfuGfUfUfuUfgCfuUfuUfgAfL96 | 3602 | A-122702 | 624 | usCfsaAfaAfgCfaAfaacAfgGfuCfuAfgsasa |
| AD-60929 | A-122703 | 625 | GfsusAfgAfcCfuGfUfUfuUfgCfuUfuUfgUfL96 | 3602 | A-122704 | 626 | asCfsaAfaAfgCfaAfaacAfgGfuCfuAfcsusu |
| AD-60930 | A-122705 | 627 | GfsasAfgAfcCfuGfUfUfuUfgCfuUfuUfgUfL96 | 3602 | A-122706 | 628 | asCfsaAfaAfgCfaAfaacAfgGfuCfuUfcsusu |
| AD-60931 | A-122707 | 629 | GfsasUfgAfcCfuGfUfUfuUfgCfuUfuUfgUfL96 | 3602 | A-122708 | 630 | asCfsaAfaAfgCfaAfaacAfgGfuCfaUfcsusu |
| AD-60932 | A-122707 | 631 | GfsasUfgAfcCfuGfUfUfuUfgCfuUfuUfgUfL96 | 3602 | A-122709 | 632 | asCfsaAfaAfgCfaAfaacAfgGfuCfaUfcsasa |
| AD-60933 | A-122710 | 633 | CfsasUfcAfcCfuGfUfUfuUfgCfuUfuUfgUfL96 | 3602 | A-122711 | 634 | asCfsaAfaAfgCfaAfaacAfgGfuGfaUfgsasa |
| AD-60934 | A-122712 | 635 | CfsusUfcUfcCfuGfUfUfuUfgCfuUfuUfgUfL96 | 3602 | A-122713 | 636 | asCfsaAfaAfgCfaAfaacAfgGfaGfaAfgsasa |
| AD-60927 | A-122714 | 637 | CfsusAfcUfgCfuGfUfUfuUfgCfuUfuUfgUfL96 | 3602 | A-122715 | 638 | asCfsaAfaAfgCfaAfaacAfgCfaGfuAfgsasa |
| AD- | A-117428 | 639 | CfsusAfgAfcCfuGfUfUfuUfgCfuUfuUfgUfL96 | 3602 | A-117429 | 640 | asCfsaAfaAfgCfaAfaacAfgGfuCfuAfgsasa |
| 579285 | | | | | | | |
| AD-60906 | A-117428 | 641 | CfsusAfgAfcCfuGfUfUfuUfgCfuUfuUfgUfL96 | 3602 | A-122309 | 642 | asCfsaAfaAfgCf(Ayh)AfaacAfgGfuCfuAfgsasa |
| AD-60907 | A-117428 | 643 | CfsusAfgAfcCfuGfUfUfuUfgCfuUfuUfgUfL96 | 3602 | A-122310 | 644 | asCfsaAfaAfgCfa(Ayh)aacAfgGfuCfuAfgsasa |
| AD-60908 | A-117428 | 645 | CfsusAfgAfcCfuGfUfUfuUfgCfuUfuUfgUfL96 | 3602 | A-122311 | 646 | asCfsaAfaAfgCfaAf(Ayh)acAfgGfuCfuAfgsasa |
| AD-60909 | A-117428 | 647 | CfsusAfgAfcCfuGfUfUfuUfgCfuUfuUfgUfL96 | 3602 | A-122312 | 648 | asCfsaAfaAfgCfaAfa(Ayh)cAfgGfuCfuAfgsasa |
| AD-60910 | A-117428 | 649 | CfsusAfgAfcCfuGfUfUfuUfgCfuUfuUfgUfL96 | 3602 | A-122313 | 650 | asCfsaAfaAfgCf(Ayh)AfaacAf(Gyh)GfuCf(Uyh) |
| | | | | | | | Afgsasa |
| AD-60911 | A-122307 | 651 | Cfsus(Ayh)(Gyh)(Ayh)(Cyh)CfuGfUfUfuUf | 3602 | A-117429 | 652 | asCfsaAfaAfgCfaAfaacAfgGfuCfuAfgsasa |
| | | | (Gyh)Cf(Uyh)Uf(Uyh)Uf(Gyh)UfL96 | | | | |
| AD-60912 | A-122308 | 653 | (Cyh)u(Ayh)(Gyh)(Ayh)(Cyh)CfuGfUfUfuUf | 3602 | A-117429 | 654 | asCfsaAfaAfgCfaAfaacAfgGfuCfuAfgsasa |
| | | | (Gyh)Cf(Uyh)Uf(Uyh)Uf(Gyh)UfL96 | | | | |
| AD-60913 | A-122307 | 655 | Cfsus(Ayh)(Gyh)(Ayh)(Cyh)CfuGfUfUfuUf | 3602 | A-122309 | 656 | asCfsaAfaAfgCf(Ayh)AfaacAfgGfuCfuAfgsasa |
| | | | (Gyh)Cf(Uyh)Uf(Uyh)Uf(Gyh)UfL96 | | | | |
| AD-60914 | A-122307 | 657 | Cfsus(Ayh)(Gyh)(Ayh)(Cyh)CfuGfUfUfuUf | 3602 | A-122310 | 658 | asCfsaAfaAfgCfa(Ayh)aacAfgGfuCfuAfgsasa |
| | | | (Gyh)Cf(Uyh)Uf(Uyh)Uf(Gyh)UfL96 | | | | |
| AD-60915 | A-122307 | 659 | Cfsus(Ayh)(Gyh)(Ayh)(Cyh)CfuGfUfUfuUf | 3602 | A-122311 | 660 | asCfsaAfaAfgCfaAf(Ayh)acAfgGfuCfuAfgsasa |
| | | | (Gyh)Cf(Uyh)Uf(Uyh)Uf(Gyh)UfL96 | | | | |
| AD- | A-117428 | 661 | CfsusAfgAfcCfuGfUfUfuUfgCfuUfuUfgUfL96 | 3602 | A-117429 | 662 | asCfsaAfaAfgCfaAfaacAfgGfuCfuAfgsasa |
| 579285 | | | | | | | |
| AD-60916 | A-122307 | 663 | Cfsus(Ayh)(Gyh)(Ayh)(Cyh)CfuGfUfUfuUf | 3602 | A-122312 | 664 | asCfsaAfaAfgCfaAfa(Ayh)cAfgGfuCfuAfgsasa |
| | | | (Gyh)Cf(Uyh)Uf(Uyh)Uf(Gyh)UfL96 | | | | |
| AD-60917 | A-122307 | 665 | Cfsus(Ayh)(Gyh)(Ayh)(Cyh)CfuGfUfUfuUf | 3602 | A-122313 | 666 | asCfsaAfaAfgCf(Ayh)AfaacAf(Gyh)GfuCf(Uyh) |
| | | | (Gyh)Cf(Uyh)Uf(Uyh)Uf(Gyh)UfL96 | | | | Afgsasa |
| AD-60918 | A-122308 | 667 | (Cyh)u(Ayh)(Gyh)(Ayh)(Cyh)CfuGfUfUfuUf | 3602 | A-122309 | 668 | asCfsaAfaAfgCf(Ayh)AfaacAfgGfuCfuAfgsasa |
| | | | (Gyh)Cf(Uyh)Uf(Uyh)Uf(Gyh)UfL96 | | | | |
| AD-60919 | A-122308 | 669 | (Cyh)u(Ayh)(Gyh)(Ayh)(Cyh)CfuGfUfUfuUf | 3602 | A-122310 | 670 | asCfsaAfaAfgCfa(Ayh)aacAfgGfuCfuAfgsasa |
| | | | (Gyh)Cf(Uyh)Uf(Uyh)Uf(Gyh)UfL96 | | | | |
| AD-60920 | A-122308 | 671 | (Cyh)u(Ayh)(Gyh)(Ayh)(Cyh)CfuGfUfUfuUf | 3602 | A-122311 | 672 | asCfsaAfaAfgCfaAf(Ayh)acAfgGfuCfuAfgsasa |
| | | | (Gyh)Cf(Uyh)Uf(Uyh)Uf(Gyh)UfL96 | | | | |
| AD-60921 | A-122308 | 673 | (Cyh)u(Ayh)(Gyh)(Ayh)(Cyh)CfuGfUfUfuUf | 3602 | A-122312 | 674 | asCfsaAfaAfgCfaAfa(Ayh)cAfgGfuCfuAfgsasa |
| | | | (Gyh)Cf(Uyh)Uf(Uyh)Uf(Gyh)UfL96 | | | | |
| AD-60922 | A-122308 | 675 | (Cyh)u(Ayh)(Gyh)(Ayh)(Cyh)CfuGfUfUfuUf | 3602 | A-122313 | 676 | asCfsaAfaAfgCf(Ayh)AfaacAf(Gyh)GfuCf(Uyh) |
| | | | (Gyh)Cf(Uyh)Uf(Uyh)Uf(Gyh)UfL96 | | | | Afgsasa |
| AD-58900 | | 677 | CfsasAfgCfaGfaCfAfUfuUfaUfcUfuUfuUfL96 | 3602 | | 678 | asAfsaAfaGfaUfaAfaugUfcUfgCfuUfgscsu |
| AD-59849 | A-121244 | 679 | CfsusAfgAfcCfuGfUfUfuUfgcuuuuguL96 | 3602 | | 680 | asCfsaAfaagCfaAfaacAfgGfucuAfgsasa |
| AD-60688 | A-120188 | 681 | csusagacCfuGfuuuugcuuuuguL96 | 3602 | | 682 | asCfsaAfaagCfaAfaacAfgGfucuAfgsasa |
| AD-60212 | A-122088 | 683 | csusagacCfuGfudTuugcuuuuguL96 | 3602 | | 684 | asCfsaAfAfAfgCfaAfaAfcAfgGfuCfuagsasa |

### Example 2: Phase I Clinical Trial of AD-60212

[0479] A Phase I, randomized, single-blind, placebo-controlled study, including, a single ascending dose (SAD) arm and a multi-ascending dose (MAD) arm, was conducted in subjects with elevated low-density lipoprotein cholesterol (LDLc or LDL-C), on or off statins, to evaluate the safety, tolerability, pharmacokinetics and pharmacodynamics of subcutaneously administered AD-60212.

[0480] More specifically, in the SAD phase of the study, the ability of a single subcutaneous fixed dose of 25 mg. 100 mg, 300 mg, 500 mg, or 800 mg of AD-60212 (ALN-PCSsc) to lower both PCSK9 protein and LDL-C in healthy volunteer subjects with baseline LDL-C ≥100 mg/dl (≥2.6 mmol/L) and fasting triglycerides <400 mg/dl (<4.5 mmol/L) was tested. In the MAD phase of the study, subjects with LDL-C≥100 mg/dl, and fasting triglycerides <400 mg/dl (<4.5 mmol/L) on and off of a stable dose of statin for ≥30 days prior to screening were treated with multiple subcutaneous injections of AD-60212 to test the ability of AD-60212 to lower both PCSK9 protein and LDL-C. Subjects in the multiple administration arm of the study were administered a single 125 mg fixed dose of AD-60212 once every week for four weeks (125 mg qW×4), or a single 250 mg fixed dose of AD-60212 once every two weeks for one month (250 mg q2W×2), or a single 300 mg fixed dose of AD-60212 once every month for two months (300 mg qM×2) without statin therapy, or a single 300 mg fixed dose of AD-60212 once every month for two months (300 mg qM×2) with statin therapy, or a single 500 mg fixed dose of AD-60212 once every month for two months (500 mg qM×2) without statin therapy, or a single 500 mg fixed dose of AD-60212 once every month for two months (500 mg qM×2) with statin therapy.

[0481] Plasma PCSK9 protein levels were determined using an ELISA assay and serum LDL-C levels were determined directly by β-quantification (Medpace Reference Laboratories, Leuven, Belgium). The levels of total cholesterol, high-density lipoprotein cholesterol (HDL-C), non-HDL-C(total cholesterol minus HDL-C), apolipoprotein B, lipoprotein (a) and triglyceride were also determined.

[0482] The cohort demographics and the baseline characteristics of the subjects in the SAD phase of the study are provided in Table 2A and the cohort demographics and the baseline characteristics of the subjects in the MAD phase of the study are provided in Table 2B.

[0483] The unmodified sense and antisense sequences of AD-60212 are:

Sense-
(SEQ ID NO: 686)
5′-CUAGACCUGUTUUGCUUUUGU-3′;
and
Antisense-
(SEQ ID NO: 685)
5′-ACAAAAGCAAAACAGGUCUAGAA-3′.

[0484] The modified sense and antisense sequences of AD-60212 are:

Sense-
(SEQ ID NO: 687)
5′-csusagacCfuGfudTuugcuuuugu-3′;
and
Antisense-
(SEQ ID NO: 688)
5′-asCfsaAfAfAfgCfaAfaAfcAfgGfuCfuagsasa-3′.

### SAD Phase

[0485] AD-60212 was well tolerated at all dose levels in the SAD phase and there were no treatment discontinuations due to adverse events (AEs) and no serious AEs were reported.

[0486] The knockdown of PCSK9 protein levels in the single dose cohort, shown as a percent mean PCSK9 knockdown relative to baseline, is shown in FIG. 1, and the lowering of LDL-C levels in the single dose cohort, shown as a percent mean LDL-C lowering relative to baseline, is shown in FIG. 2. Table 3 provides the mean (SD) percent change from baseline in the protein level of PCSK9, the level of LDL-C, the level of total cholesterol, the level of HDL-C, the level of non-HDL-C, the level of apolipoprotein B, the level of triglycerides, and the level of apolipoprotein a at days 84 and 180 post-dose in the SAD phase.

[0487] The data demonstrate that administration of AD-60212 reduced PCSK9 levels in a dose-dependent manner up to 300 mg. Doses ≥300 mg produced similar, sustained reductions in PCSK9 levels that were maintained over a period of at least 6 months. PCSK9 levels returned to baseline (mean of last three measurements ≥80% of baseline) by day 180 in the 25-mg and 100-mg dose cohorts. In subjects receiving doses ≥300 mg (n=12), the maximum individual relative reduction from baseline in PCSK9 levels was 89% (800-mg dose, day 112). The mean maximal percent reduction (mean percent reduction at individual nadir) was 82% and was observed in the 800-mg dose cohort. Change from baseline in PCSK9 levels in subjects receiving ALN-PCSsc 300-800 mg (n=2-6 per dose group), was significantly greater than in placebo-treated subjects (P≤0.011) for all 11 measurement points from day 7±1 post-treatment through day 112 post-treatment.

[0488] The data further demonstrate that AD-60212 administration resulted in dose-dependent LDL-C reductions up to 300 mg, at which near maximal reductions were achieved. LDL-C reductions were similar across the 300-800 mg dose range. In subjects receiving these doses (n=12), the maximum individual decrease from baseline in LDL-C was 78% (500-mg dose; day 56). The mean maximal and maximal least-squares mean (LSM) percent reductions were 59% and were observed in the 500 and 800-mg cohorts. LDL-C levels returned towards baseline levels by 180 days after the last administration of the 25-mg and 100-mg doses. LDL-C reduction was maintained until at least day 180 after doses ≥300 mg. LDL-C reduction from baseline in subjects receiving ALN-PCSsc 300-800 mg (n=3-6) was statistically significant compared with placebo (P≤0.037) in all 10 determinations from day 14±2 after treatment through day 112 after treatment.

[0489] Decreases in total cholesterol, non-HDL-C, apolipoprotein B and lipoprotein (a) concentrations were also noted in AD-60212-treated subjects. Reductions in these parameters were statistically significant compared with placebo for the majority of comparisons.

### MAD Phase

[0490] AD-60212 was also well tolerated at all dose levels in the MAD phase and there were no treatment discontinuations due to adverse events (AEs) and no serious AEs were reported.

[0491] The knockdown of PCSK9 protein levels in the multiple dose cohort, shown as a percent mean PCSK9 knockdown relative to baseline, is shown in FIG. 3, and the lowering of LDL-C levels in the multiple dose cohort, shown as a percent mean LDL-C lowering relative to baseline, is shown in FIG. 4. Table 4 provides the mean (SD) percent change from baseline in the protein level of PCSK9, the level of LDL-C, the level of total cholesterol, the level of HDL-C, the level of non-HDL-C, the level of apolipoprotein B, the level of triglycerides, and the level of apolipoprotein a at days 84 and 180 post-dose in the SAD phase.

[0492] The data demonstrate that PCSK9 protein levels were reduced following administration of AD-60212 with all treatment regimens studied. Reductions were similar across all multiple dose cohorts and the reductions were maintained for at least 6 months after the last dose. Consistent with published literature (Khera A V, et al. (2015) Am J Cardiol 115:178-82; Guo Y L, et al. (2013) Clin Drug Investig 33:877-83), baseline values of PCSK9 were higher in subjects receiving stable doses of statins. Reductions in PCSK9 were independent of baseline PCSK9 levels and similar in subjects irrespective of statin therapy. The maximum individual reduction from baseline in PCSK9 was 94% (500 mg QMx2 co-administered with statin, day 63). The mean maximal percent reduction was 89%, observed in subjects receiving the 500-mg dose co-treated with a statin. Change in PCSK9 concentrations from baseline in subjects receiving multiple doses of AD-60212 as monotherapy (i.e., without statins; n=3-6 per dose group), was significantly greater than placebo (P≤0.002) for all 15 measurement points from day 4 post-treatment through day 126.

[0493] The data further demonstrate that similar sustained LDL-C reductions were achieved with all multiple dose AD-60212 treatment regimens. LDL-C reduction was independent of baseline LDL-C levels and similar with and without statin co-therapy. The maximum individual LDL-C reduction was 83% (500 mg QMx2 co-administered with statin, day 29). The mean maximal percent reduction in LDL-C was 64% with a LSM reduction of 60% observed in the cohort receiving the 300-mg dose without statin. LDL-C lowering in all MD cohorts persisted for at least 6 months.

[0494] Change in LDL-C from baseline in AD-60212 monotherapy subjects (n=3-6) differed significantly from placebo (P≤0.05) over periods ranging from ˜8 to ˜17 weeks depending on the treatment regimen.

[0495] Decreases in total cholesterol, non-HDL-C, apolipoprotein B and lipoprotein (a) concentrations were also noted in ALN-PCSsc-treated subjects. Reductions in these parameters were statistically significant compared with placebo for the majority of comparisons.

[0496] In summary, subcutaneous administration of AD-60212 targeting PCSK9 to reduce LDL-C levels, was well tolerated in single doses of 25 to 800 mg, and in MD regimens of 2-4 doses totaling 500-1000 mg over a 28-day period.

[0497] As shown in FIGS. 1 and 2 and Table 3, a single subcutaneous injection of a fixed dose (≥300 mg of AD-60212 resulted in durable knockdown of PCSK9 and lowering of LDL-C for over 6 months after a single dose. There was up to 89% maximal PCSK9 knockdown, with a mean maximal PCSK9 reduction of 82%, and up to 78% maximal reduction LDL-C lowering, with a mean maximal LDL-C reduction of 59% after administration of a single fixed dose of AD-60212. In addition, LDL-C was significantly (P<0.001) reduced by a mean of 44% at day 140 after a single dose.

[0498] As shown in FIGS. 3 and 4 and Table 4, two monthly fixed doses of AD-60212 resulted in up to 94% maximal knockdown of PCSK9, with a mean maximal PCSK9 reduction of 89%, and up to 83% maximal reduction of LDL-C, with a mean maximal LDL-C reduction of 64%, with or without concomitant statin administration.

[0499] These data demonstrate that single doses of AD-60212 (≥300 mg) and all multiple doses demonstrated herein were associated with highly sustained reductions of circulating concentrations of both PCSK9 and LDL-C. At these doses, the effect on PCSK9 and LDL-C remained significantly reduced for at least 180 days post-treatment, such that PCSK9 reductions of up to 76%, and LDL-C reductions of up to 48% were still apparent 6 months after the last AD-60212 injection, and demonstrated remarkably little variation over the 6-month post-dose period. Additive serum LDL-C lowering was attained with AD-60212 when added to statin therapy, and the combination therapy did not impact the safety and tolerability of either agent.

[0500] In both the SAD and MAD phases, decreases in total cholesterol, non-HDL-C, apolipoprotein B and lipoprotein (a) concentrations were observed in AD-60212-treated subjects. Reductions in these parameters were statistically significant compared with placebo for the majority of comparisons.

TABLE 2A
SAD Cohort Demographics and Baseline Characteristics.

| | Single ascending dose phase | | | | | | | | | |
|---|---|---|---|---|---|---|---|---|---|---|
| | | | ALN-PCSsc | | | | | | | |
| | Placebo | | 25 mg | | 100 mg | | 300 mg | | 500 mg | |
| | (n = 6) | | (n = 3) | | (n = 3) | | (n = 3) | | (n = 3) | |
| Age, | 48 | (14.2) | 47 | (14.2) | 48 | (6.2) | 48 | (12.7) | 39 | (14.0) |
| years | | | | | | | | | | |
| Mean | | | | | | | | | | |
| (SD) | | | | | | | | | | |
| Sex, | | | | | | | | | | |
| n (%) | | | | | | | | | | |
| Male | 2 | (33.3%) | 3 | (100%) | 3 | (100%) | 3 | (100%) | 3 | (100%) |
| Race, | | | | | | | | | | |
| n (%) | | | | | | | | | | |
| White | 4 | (66.7%) | 2 | (66.7%) | 3 | (100%) | 1 | (33.3%) | 3 | (100%) |
| Black or | 2 | (33.3%) | 1 | (33.3%) | 0 | | 1 | (33.3%) | 0 | |
| African | | | | | | | | | | |
| American | | | | | | | | | | |
| Asian | 0 | | 0 | | 0 | | 1 | (33.3%) | 0 | |
| Other | 0 | | 0 | | 0 | | 0 | | 0 | |
| Body | 70.6 | (12.04) | 84.5 | (2.11) | 77.3 | (6.66) | 81.2 | (11.04) | 71.6 | (7.93) |
| weight, | | | | | | | | | | |
| kg | | | | | | | | | | |
| Mean | | | | | | | | | | |
| (SD) | | | | | | | | | | |
| Height, | 168 | (10.6) | 175 | (2.3) | 174 | (5.1) | 173 | (9.6) | 175 | (3.1) |
| cm | | | | | | | | | | |
| Mean | | | | | | | | | | |
| (SD) | | | | | | | | | | |
| BMI, | 24.9 | (3.17) | 27.7 | (0.21) | 25.5 | (2.10) | 27.0 | (1.29) | 23.4 | (3.01) |
| kg/m² | | | | | | | | | | |
| Mean | | | | | | | | | | |
| (SD) | | | | | | | | | | |
| LDL-C, | 3.4 | (0.50) | 4.6 | (1.31) | 3.9 | (0.92) | 4.2 | (0.95) | 3.1 | (0.44) |
| mmol/L | | | | | | | | | | |
| Mean | | | | | | | | | | |
| (SD) | | | | | | | | | | |
| TG, | 0.8 | (0.14) | 1.3 | (0.67) | 2.0 | (1.16) | 1.5 | (0.55) | 1.8 | (0.95) |
| mmol/L | | | | | | | | | | |
| Mean | | | | | | | | | | |
| (SD) | | | | | | | | | | |
| PCSK9, | 278.95 | (99.53) | 342.65 | (67.89) | 233.77 | (39.17) | 253.82 | (22.36) | 263.23 | (24.98) |
| μg/L | | | | | | | | | | |
| Mean | | | | | | | | | | |
| (SD) | | | | | | | | | | |
| | | | Single ascending dose phase | | | | Placebo | | | |
| | | | ALN-PCSsc | | | | With | | | |
| | | | 800 mg | | Overall | | Statin | | No Statin | |
| | | | (n = 6) | | (n = 24) | | (n = 4) | | (n = 8) | |
| | | Age, | 49 | (6.7) | 47 | (10.7) | 58 | (3.0) | 51 | (14.2) |
| | | years | | | | | | | | |
| | | Mean | | | | | | | | |
| | | (SD) | | | | | | | | |
| | | Sex, | | | | | | | | |
| | | n (%) | | | | | | | | |
| | | Male | 5 | (83.3%) | 19 | (79.2%) | 2 | (50.0%) | 6 | (75.0%) |
| | | Race, | | | | | | | | |
| | | n (%) | | | | | | | | |
| | | White | 3 | (50.0%) | 16 | (66.7%) | 4 | (100%) | 7 | (87.5%) |
| | | Black or | 0 | | 4 | (16.7%) | 0 | | 0 | |
| | | African | | | | | | | | |
| | | American | | | | | | | | |
| | | Asian | 1 | (16.7%) | 2 | (8.3%) | 0 | | 0 | |
| | | Other | 2 | (33.3%) | 2 | (8.3%) | 0 | | 1 | (12.5%) |
| | | Body | 74.0 | (6.01) | 75.5 | (9.16) | 74.3 | (5.07) | 77.6 | (10.31) |
| | | weight, | | | | | | | | |
| | | kg | | | | | | | | |
| | | Mean | | | | | | | | |
| | | (SD) | | | | | | | | |
| | | Height, | 169 | (5.5) | 172 | (7.2) | 168 | (10.5) | 171 | (9.3) |
| | | cm | | | | | | | | |
| | | Mean | | | | | | | | |
| | | (SD) | | | | | | | | |
| | | BMI, | 25.9 | (1.60) | 25.6 | (2.39) | 26.5 | (2.72) | 26.7 | (2.64) |
| | | kg/m² | | | | | | | | |
| | | Mean | | | | | | | | |
| | | (SD) | | | | | | | | |
| | | LDL-C, | 4.1 | (0.74) | 3.8 | (0.85) | 3.7 | (2.32) | 3.4 | (0.54) |
| | | mmol/L | | | | | | | | |
| | | Mean | | | | | | | | |
| | | (SD) | | | | | | | | |
| | | TG, | 1.3 | (0.24) | 1.4 | (0.65) | 1.7 | (0.53) | 1.4 | (0.43) |
| | | mmol/L | | | | | | | | |
| | | Mean | | | | | | | | |
| | | (SD) | | | | | | | | |
| | | PCSK9, | 279.62 | (66.90) | 276.32 | (68.28) | 460.69 | (56.295) | 276.23 | (58.69) |
| | | μg/L | | | | | | | | |
| | | Mean | | | | | | | | |
| | | (SD) | | | | | | | | |

BMI = body mass index;
LDL-C = low-density lipoprotein cholesterol;
PCSK9 = proprotein convertase subtilisin/kexin type 9;
QM × 2 = 2 monthly doses;
QW × 4 = 4 weekly doses;
Q2W × 2 = 2 biweekly doses;
SD = standard deviation;
TG = triglycerides.
To convert values for cholesterol to mg/dL multiply by 38.67.
To convert values for TG to mg/dL multiply by 88.57.

TABLE 2B
MAD Cohort Demographics and Baseline Characteristics.

| | Multiple dose phase | | | | | | | | | |
|---|---|---|---|---|---|---|---|---|---|---|
| | | | | | ALN-PCSsc | | | | | |
| | Placebo | | | | 300 mg | | 300 mg | | 500 mg | |
| | With | | | | QM × 2 | | QM × 2 | | QM × 2 | |
| | Statin | | No Statin | | With Statin | | No Statin | | With Statin | |
| | (n = 4) | | (n = 8) | | (n = 4) | | (n = 6) | | (n = 5) | |
| Age, years | 58 | (3.0) | 51 | (14.2) | 52 | (21.6) | 47 | (8.7) | 56 | (11.5) |
| Mean | | | | | | | | | | |
| (SD) | | | | | | | | | | |
| Sex, n (%) | | | | | | | | | | |
| Male | 2 | (50.0%) | 6 | (75.0%) | 2 | (50.0%) | 6 | (100%) | 2 | (40.0%) |
| Race, n (%) | | | | | | | | | | |
| White | 4 | (100%) | 7 | (87.5%) | 3 | (75.0%) | 6 | (100%) | 3 | (60.0%) |
| Black or | 0 | | 0 | | 0 | | 0 | | 1 | (20.0%) |
| African | | | | | | | | | | |
| American | | | | | | | | | | |
| Asian | 0 | | 0 | | 1 | (25.0%) | 0 | | 1 | (20.0%) |
| Other | 0 | | 1 | (12.5%) | 0 | | 0 | | 0 | |
| Body | 74.3 | (5.07) | 77.6 | (10.31) | 85.0 | (22.04) | 77.8 | (15.19) | 71.9 | (11.03) |
| weight, kg | | | | | | | | | | |
| Mean | | | | | | | | | | |
| (SD) | | | | | | | | | | |
| Height, cm | 168 | (10.5) | 171 | (9.3) | 176 | (12.5) | 175 | (7.4) | 167 | (11.7) |
| Mean | | | | | | | | | | |
| (SD) | | | | | | | | | | |
| BMI, kg/m² | 26.5 | (2.72) | 26.7 | (2.64) | 27.1 | (3.59) | 25.2 | (2.95) | 25.7 | (1.97) |
| Mean | | | | | | | | | | |
| (SD) | | | | | | | | | | |
| LDL-C, | 3.7 | (2.32) | 3.4 | (0.54) | 3.7 | (0.79) | 3.7 | (0.52) | 2.7 | (0.51) |
| mmol/L | | | | | | | | | | |
| Mean | | | | | | | | | | |
| (SD) | | | | | | | | | | |
| TG, mmol/L | 1.7 | (0.53) | 1.4 | (0.43) | 1.5 | (0.98) | 1.5 | (1.02) | 1.1 | (0.50) |
| Mean | | | | | | | | | | |
| (SD) | | | | | | | | | | |
| PCSK9, μg/L | 460.69 | (56.295) | 276.23 | (58.69) | 460.69 | (209.435) | 311.47 | (59.85) | 433.44 | (107.28) |
| Mean (SD) | | | | | | | | | | |
| | | | Multiple dose phase | | | | | | | |
| | | | ALN-PCSsc | | | | | | | |
| | | | 500 mg | | 125 mg | | 250 mg | | | |
| | | | QM × 2 | | QW × 4 | | Q2W × 2 | | | |
| | | | No Statin | | No Statin | | No Statin | | Overall | |
| | | | (n = 6) | | (n = 6) | | (n = 6) | | (n = 45) | |
| | | Age, years | 42 | (16.1) | 55 | (9.4) | 61 | (6.3) | 52 | (12.7) |
| | | Mean | | | | | | | | |
| | | (SD) | | | | | | | | |
| | | Sex, n (%) | | | | | | | | |
| | | Male | 3 | (50.0%) | 4 | (66.7%) | 4 | (66.7%) | 29 | (64.4%) |
| | | Race, n (%) | | | | | | | | |
| | | White | 5 | (83.3%) | 5 | (83.3%) | 3 | (50.0%) | 36 | (80.0%) |
| | | Black or | 0 | | 0 | | 1 | (16.7%) | 2 | (4.4%) |
| | | African | | | | | | | | |
| | | American | | | | | | | | |
| | | Asian | 1 | (16.7%) | 1 | (16.7%) | 0 | | 4 | (8.9%) |
| | | Other | 0 | | 0 | | 2 | (33.3%) | 3 | (6.7%) |
| | | Body | 64.9 | (7.86) | 73.1 | (7.07) | 83.2 | (8.12) | 75.8 | (12.03) |
| | | weight, kg | | | | | | | | |
| | | Mean | | | | | | | | |
| | | (SD) | | | | | | | | |
| | | Height, cm | 168 | (5.3) | 167 | (6.9) | 176 | (10.1) | 171 | (9.2) |
| | | Mean | | | | | | | | |
| | | (SD) | | | | | | | | |
| | | BMI, kg/m² | 23.0 | (2.34) | 26.2 | (2.72) | 27.0 | (1.93) | 25.9 | (2.72) |
| | | Mean | | | | | | | | |
| | | (SD) | | | | | | | | |
| | | LDL-C, | 3.2 | (1.29) | 3.6 | (0.48) | 3.8 | (0.37) | 3.5 | (0.92) |
| | | mmol/L | | | | | | | | |
| | | Mean | | | | | | | | |
| | | (SD) | | | | | | | | |
| | | TG, mmol/L | 1.0 | (0.23) | 1.0 | (0.29) | 1.8 | (0.78) | 1.4 | (0.66) |
| | | Mean | | | | | | | | |
| | | (SD) | | | | | | | | |
| | | PCSK9, μg/L | 288.07 | (69.07) | 380.03 | (50.63) | 288.73 | (53.53) | 348.34 | (103.99) |
| | | Mean (SD) | | | | | | | | |

BMI = body mass index;
LDL-C = low-density lipoprotein cholesterol;
PCSK9 = proprotein convertase subtilisin/kexin type 9;
QM × 2 = 2 monthly doses;
QW × 4 = 4 weekly doses;
Q2W × 2 = 2 biweekly doses;
SD = standard deviation;
TG = triglycerides.
To convert values for cholesterol to mg/dL multiply by 38.67.
To convert values for TG to mg/dL multiply by 88.57.

TABLE 3
Mean (SD) percent change from baseline in pharmacodynamic parameters in the SAD phase (Pharmacodynamic population)

| | | | ALN-PCSsc | | | | | | | | | |
|---|---|---|---|---|---|---|---|---|---|---|---|---|
| | Placebo | | 25 mg | | 100 mg | | 300 mg | | 500 mg | | 800 mg | |
| | (n = 6) | | (n = 3) | | (n = 3) | | (n = 3) | | (n = 3) | | (n = 6) | |
| PCSK9 | | | | | | | | | | | | |
| Day 84 | | | | | | | | | | | | |
| n | 5 | | 2 | | 3 | | 3 | | 3 | | 6 | |
| Mean (SD) percent change | −0.1 | (14.3) | −47.3 | (7.2) | −29.9 | (12.9) | −72.6 | (12.1) | −68.7 | (9.8) | −72.2 | (8.5) |
| Day 180 | | | | | | | | | | | | |
| n | NA | | NA | | 2 | | 3 | | 2 | | 4 | |
| Mean (SD) percent change | NA | | NA | | −15.7 | (0.2) | −47.8 | (24.8) | −70.3 | (6.6) | −74.3 | (13.2) |
| Mean (SD) percent change | −29.4 | (9.53) | −54.3 | (4.75) | −48.9 | (27.37) | −77.9 | (3.49) | −75.7 | (11.75) | −82.3 | (4.85) |
| at individual nadir^{a} | | | | | | | | | | | | |
| Mean (SD) percent change | −17.5 | (19.56) | −51.2 | (0.56) | −41.7 | (21.28) | −74.0 | (0.57) | −77.7 | (1.28) | −79.4 | (3.27) |
| at group nadir^{b} | | | | | | | | | | | | |
| Time to group nadir, days | 35 | | 42 | | 42 | | 42 | | 112 | | 98 | |
| LDL-C | | | | | | | | | | | | |
| Day 84 | | | | | | | | | | | | |
| n | 5 | | 2 | | 3 | | 3 | | 3 | | 5 | |
| Mean (SD) percent change | −7.5 | (15.6) | −27.9 | (11.4) | −36.6 | (6.1) | −48.4 | (19.0) | −47.6 | (15.2) | −41.9 | (12.3) |
| Day 180 | | | | | | | | | | | | |
| n | NA | | NA | | 2 | | 3 | | 2 | | 4 | |
| Mean (SD) percent change | NA | | NA | | −26.3 | (2.1) | −47.8 | (0.5) | −37.9 | (21.7) | −35.2 | (16.8) |
| Mean (SD) percent change | −18.7 | (5.61) | −34.5 | (8.62) | −42.9 | (15.35) | −55.0 | (10.03) | −55.1 | (19.93) | −59.2 | (12.25) |
| at individual nadir^{a} | | | | | | | | | | | | |
| Mean (SD) percent change | −8.6 | (18.07) | −27.9 | (11.43) | −38.7 | (2.07) | −48.4 | (18.99) | −55.1 | (24.46) | −51.8 | (8.44) |
| at group nadir^{b} | | | | | | | | | | | | |
| Time to group nadir, days | 98 | | 84 | | 140 | | 84 | | 98 | | 35 | |
| Total cholesterol | | | | | | | | | | | | |
| Day 84 | −1.3 | (11.7) | −20.2 | (9.4) | −18.2 | (10.7) | −30.9 | (9.4) | −24.2 | (10.2) | −28.1 | (11.7) |
| Day 180 | NA | | NA | | −14.1 | (2.9) | −30.5 | (5.7) | −23.5 | (11.1) | −25.0 | (12.2) |
| HDL-C | | | | | | | | | | | | |
| Day 84 | 11.7 | (14.4) | 8.3 | (10.3) | 19.6 | (17.7) | 50.5 | (71.3) | 6.5 | (6.4) | 1.9 | (17.0) |
| Day 180 | NA | | NA | | 18.1 | (26.3) | 12.8 | (42.5) | −2.8 | (2.8) | −0.2 | (16.4) |
| non-HDL-C | | | | | | | | | | | | |
| Day 84 | −6.6 | (12.2) | −25.5 | (11.3) | −28.8 | (7.5) | −47.2 | (19.2) | −34.1 | (12.6) | −36.0 | (12.6) |
| Day 180 | NA | | NA | | −21.2 | (3.6) | −38.0 | (12.6) | −29.5 | (13.6) | −30.4 | (13.4) |
| Apolipoprotein B | | | | | | | | | | | | |
| Day 84 | −10.0 | (15.6) | −18.2 | (9.7) | −28.1 | (15.6) | −45.5 | (20.5) | −36.0 | (11.7) | −44.5 | (11.8) |
| Day 180 | NA | | NA | | −30.5 | (7.6) | −37.6 | (12.2) | −29.2 | (18.8) | −27.7 | (13.6) |
| Triglycerides | | | | | | | | | | | | |
| Day 84 | −12.4 | (7.9) | −9.0 | (19.7) | −9.6 | (20.2) | −25.1 | (29.2) | 15.1 | (28.1) | 24.6 | (48.2) |
| Day 180 | NA | | NA | | −18.7 | (35.5) | 45.0 | (105.8) | −8.6 | (10.1) | −7.4 | (23.2) |
| Lipoprotein (a) | | | | | | | | | | | | |
| Day 84 | 6.7 | (25.7) | −2.8 | (29.0) | −20.1 | (3.5) | −33.8 | (46.7) | −30.4 | (27.0) | −22.1 | (20.8) |

| | | | | | | | | | | |
|---|---|---|---|---|---|---|---|---|---|---|
| Day 180 | NA | NA | 6.6 | (23.7) | −37.9 | (35.8) | −31.1 | (26.7) | −2.5 | (18.9) |

HDL-C = high-density lipoprotein cholesterol;
LDL-C = low-density lipoprotein cholesterol;
NA = not applicable;
PCSK9 = proprotein convertase subtilisinikexin type 9;
SD = standard deviation.
^{a}Individual nadir values defined as the largest post-dose percent reduction from baseline value per subject. These values were then summarized.
^{b}Group nadir is defined as the largest mean post-dose percent change from baseline value during the study.

TABLE 4
Mean (SD) percent change from baseline in pharmacodynamic parameters in the MAD phase (Pharmacodynamic population)

| | | | | | ALN-PCSsc | | | | | | | | | | | |
|---|---|---|---|---|---|---|---|---|---|---|---|---|---|---|---|---|
| | | | | | 300 mg | | 300 mg | | 500 mg | | 500 mg | | 125 mg | | 250 mg | |
| | Placebo | | | | QM × 2 | | QM × 2 | | QM × 2 | | QM × 2 | | QW × 4 | | Q2W × 2 | |
| | With Statin | | No Statin | | With Statin | | No Statin | | With Statin | | No Statin | | No Statin | | No Statin | |
| | (n = 3) | | (n = 8) | | (n = 3) | | (n = 6) | | (n = 5) | | (n = 6) | | (n = 6) | | (n = 6) | |
| PCSK9 | | | | | | | | | | | | | | | | |
| 84 days | | | | | | | | | | | | | | | | |
| after last dose | | | | | | | | | | | | | | | | |
| n | 3 | | 6 | | 3 | | 6 | | 5 | | 6 | | 6 | | 6 | |
| Mean (SD) | −0.5 | (33.4) | 1.3 | (36.7) | −78.1 | (3.9) | −70.6 | (10.9) | −82.6 | (9.5) | −74.2 | (8.3) | −75.0 | (7.5) | −78.0 | (6.8) |
| percent change | | | | | | | | | | | | | | | | |
| 180 days | | | | | | | | | | | | | | | | |
| after last dose | | | | | | | | | | | | | | | | |
| n | NA | | NA | | 1 | | 6 | | 4 | | 6 | | 6 | | 6 | |
| Mean (SD) | NA | | NA | | −69.7 | (NC) | −62.6 | (10.7) | −75.9 | (10.8) | −72.3 | (14.3) | −63.3 | (14.5) | −67.4 | (9.9) |
| percent change | | | | | | | | | | | | | | | | |
| Mean (SD) | −42.4 | (3.76) | −25.3 | (20.51) | −86.1 | (2.06) | −80.4 | (4.92) | −88.5 | (3.67) | −81.5 | (5.73) | −83.8 | (2.13) | −82.7 | (2.81) |
| percent | | | | | | | | | | | | | | | | |
| change at | | | | | | | | | | | | | | | | |
| individual | | | | | | | | | | | | | | | | |
| nadir^{a} | | | | | | | | | | | | | | | | |
| Mean (SD) | −21.2 | (8.9) | −6.1 | (NC) | −83.6 | (4.06) | −73.1 | (6.31) | −85.2 | (1.83) | −79.9 | (5.35) | −80.3 | (4.73) | −79.4 | (3.83) |
| percent | | | | | | | | | | | | | | | | |
| change at group | | | | | | | | | | | | | | | | |
| nadir^{b} | | | | | | | | | | | | | | | | |
| Time to group | 28 | | 91 | | 56 | | 56 | | 84 | | 84 | | 77 | | 35 | |
| nadir, days | | | | | | | | | | | | | | | | |
| LDL-C | | | | | | | | | | | | | | | | |
| 84 days | | | | | | | | | | | | | | | | |
| after last dose | | | | | | | | | | | | | | | | |
| n | 3 | | 5 | | 3 | | 6 | | 5 | | 6 | | 6 | | 6 | |
| Mean (SD) | 0.9 | (33.3) | −7.0 | (11.6) | −44.7 | (21.2) | −48.8 | (9.0) | −38.9 | (13.6) | −48.5 | (14.2) | −41.8 | (8.8) | −50.0 | (10.5) |
| percent change | | | | | | | | | | | | | | | | |
| 180 days | | | | | | | | | | | | | | | | |
| after last dose | | | | | | | | | | | | | | | | |
| n | NA | | NA | | 1 | | 6 | | 4 | | 6 | | 6 | | 6 | |
| Mean (SD) | NA | | NA | | −30.0 | (NC) | −44.3 | (12.8) | −44.2 | (26.2) | −45.3 | (16.1) | −34.5 | (5.8) | −42.1 | (16.6) |
| percent change | | | | | | | | | | | | | | | | |
| Mean (SD) | −27.7 | (13.19) | −19.2 | (9.68) | −53.8 | (19.78) | −64.4 | (13.22) | −59.9 | (18.14) | −56.2 | (14.59) | −52.1 | (4.75) | −60.4 | (11.02) |
| percent | | | | | | | | | | | | | | | | |
| change at | | | | | | | | | | | | | | | | |
| individual | | | | | | | | | | | | | | | | |
| nadir^{a} | | | | | | | | | | | | | | | | |
| Mean (SD) | −18.4 | (17.7) | −16.3 | (NC) | −46.7 | (18.29) | −55.7 | (13.20) | −48.9 | (23.77) | −51.9 | (14.97) | −44.8 | (4.07) | −54.8 | (7.77) |
| percent | | | | | | | | | | | | | | | | |
| change at group | | | | | | | | | | | | | | | | |
| nadir^{b} | | | | | | | | | | | | | | | | |
| Time to group | 35 | | 105 | | 70 | | 70 | | 140 | | 140 | | 63 | | 49 | |
| nadir, days | | | | | | | | | | | | | | | | |
| Total | | | | | | | | | | | | | | | | |
| cholesterol | | | | | | | | | | | | | | | | |
| 84 days after | 2.9 | (25.1) | −11.8 | (11.3) | −24.2 | (13.4) | −39.9 | (7.4) | −28.6 | (16.1) | −25.8 | (9.3) | −25.9 | (5.4) | −32.0 | (7.4) |
| last dose | | | | | | | | | | | | | | | | |
| 180 days after | NA | | NA | | −13.9 | (NA) | −26.0 | (6.5) | −25.0 | (19.6) | −24.2 | (12.8) | −22.2 | (4.7) | −26.4 | (13.9) |
| last dose | | | | | | | | | | | | | | | | |
| HDL-C | | | | | | | | | | | | | | | | |
| 84 days after | 10.6 | (11.8) | −2.1 | (15.1) | 11.2 | (9.4) | 13.5 | (15.6) | 5.2 | (15.9) | 13.1 | (15.9) | 7.3 | (3.9) | 7.0 | (15.8) |
| last dose | | | | | | | | | | | | | | | | |
| 180 days after | NA | | NA | | 20.5 | (NA) | 7.5 | (7.7) | 3.8 | (10.6) | 6.0 | (12.7) | 3.5 | (6.5) | 10.2 | (11.0) |
| last dose | | | | | | | | | | | | | | | | |
| non-HDL-C | | | | | | | | | | | | | | | | |
| 84 days after | 1.3 | (36.5) | −15.1 | (11.2) | −35.2 | (10.7) | −55.3 | (12.7) | −43.4 | (19.1) | −43.6 | (11.8) | −37.4 | (9.6) | −42.5 | (9.2) |
| last dose | NA | | NA | | −25.5 | (NA) | −35.5 | (8.0) | −36.4 | (22.0) | −37.7 | (15.4) | −31.1 | (4.9) | −36.6 | (16.3) |
| Apolipo- | | | | | | | | | | | | | | | | |
| protein B | | | | | | | | | | | | | | | | |
| 84 days after | −6.1 | (31.7) | −15.3 | (11.0) | −36.8 | (9.7) | −51.5 | (10.7) | −40.1 | (14.0) | −45.3 | (11.9) | −36.4 | (10.1) | −42.7 | (9.9) |
| last dose | | | | | | | | | | | | | | | | |
| 180 days after | NA | | NA | | −24.1 | (NA) | −35.1 | (10.1) | −34.9 | (21.3) | −37.4 | (14.8) | −24.4 | (3.1) | −36.5 | (15.7) |
| last dose | | | | | | | | | | | | | | | | |
| Triglycerides | | | | | | | | | | | | | | | | |
| 84 days after | 1.5 | (45.7) | −8.1 | (33.8) | −8.8 | (6.5) | −39.3 | (13.8) | −16.6 | (15.2) | −0.1 | (24.5) | −7.5 | (19.0) | −18.0 | (12.0) |
| last dose | | | | | | | | | | | | | | | | |
| 180 days after | NA | | NA | | −13.1 | (NA) | 7.4 | (37.3) | 7.2 | (23.1) | 6.1 | (15.8) | −0.7 | (28.9) | 21.3 | (48.7) |
| last dose | | | | | | | | | | | | | | | | |
| Lipoprotein (a) | | | | | | | | | | | | | | | | |
| 84 days after | 3.2 | (20.9) | −14.7 | (18.6) | −17.9 | (42.5) | −19.4 | (24.9) | −28.9 | (28.0) | −27.6 | (15.6) | −27.4 | (8.9) | −25.3 | (12.9) |

| | | | | | | | | | | | | | | |
|---|---|---|---|---|---|---|---|---|---|---|---|---|---|---|
| last dose | | | | | | | | | | | | | | |
| 180 days after | NA | NA | −12.2 | (NA) | −15.9 | (26.6) | −23.7 | (26.4) | −27.7 | (23.7) | −29.0 | (15.3) | −28.9 | (12.6) |
| last dose | | | | | | | | | | | | | | |

HDL-C = high-density lipoprotein cholesterol;
LDL-C = low-density lipoprotein cholesterol;
NA = not applicable;
NC = not calculated;
PCSK9 = proprotein convertase subtilisin/kexin type 9;
QM × 2 = 2 monthly doses;
QW × 4 = 4 weekly doses;
Q2W × 2 = 2 biweekly doses;
SD = standard deviation.
^{a}Individual nadir values defined as the largest post-dose percent reduction from baseline value per subject. These values were then summarized.
^{b}Group nadir is defined as the largest mean post-dose percent change from baseline value during the study.

1. A method of inhibiting the expression of a PCSK9 gene in a human subject, comprising administering to the subject a fixed dose of about 25 mg to about 800 mg of a double-stranded ribonucleic acid (RNAi) agent,
wherein the double-stranded RNAi agent comprises a sense strand and an antisense strand forming a double stranded region, the antisense strand comprising a region of complementarity which comprises at least 15 contiguous nucleotides differing by no more than 3 nucleotides from nucleotides 3544-3623 of the nucleotide sequence of SEQ ID NO:1, thereby inhibiting the expression of the PCSK9 gene in the subject.

2. A method of decreasing the level of low density lipoprotein cholesterol (LDLc) in serum in a human subject, comprising administering to the subject a fixed dose of about 25 mg to about 800 mg of a double-stranded ribonucleic acid (RNAi) agent,
wherein the double-stranded RNAi agent comprises a sense strand and an antisense strand forming a double stranded region, the antisense strand comprising a region of complementarity which comprises at least 15 contiguous nucleotides differing by no more than 3 nucleotides from nucleotides 3544-3623 of the nucleotide sequence of SEQ ID NO:1, thereby decreasing the level of LDLc in the subject.

3. (canceled)

4. (canceled)

5. The method of claim 1, wherein the fixed dose is administered to the subject at an interval of once a week; once every two weeks; once a month; once a quarter; or bianually.

6.-9. (canceled)

10. The method of claim 5, wherein the subject is administered a fixed dose of about 25 mg to about 50 mg once a week; a fixed dose of about 50 mg to about 100 mg once every two weeks; a fixed dose of about 100 mg to about 200 mg once a month; a fixed dose of about 200 mg to about 800 mg once a quarter; or a fixed dose of about 200 mg to about 800 mg biannually.

11.-18. (canceled)

19. The method of claim 1, wherein the double stranded RNAi agent is administered to the subject subcutaneously.

20. The method of claim 19, wherein the subcutaneous administration is subcutaneous injection.

21. (canceled)

22. The method of claim 1, wherein the antisense strand comprises a nucleotide sequence corresponding to the unmodified sequence of any one of the nucleotide sequences provided in Table 1.

23. The method of claim 1, wherein the antisense strand comprises the nucleotide sequence 5′-ACAAAAGCAAAACAGGUCUAGAA-3′(SEQ ID NO: 685).

24. The method of claim 1, wherein the sense strand comprises the nucleotide sequence 5′-CUAGACCUGUTUUGCUUUUGU-3′ (SEQ ID NO: 686).

25.-27. (canceled)

28. The method of claim 1, wherein all of the nucleotides of the sense strand and all of the nucleotides of the antisense strand comprise a nucleotide modification.

29.-62. (canceled)

63. The method of claim 1, wherein the double-stranded ribonucleic acid RNAi agent further comprises a ligand.

64. The method of claim 63, wherein the ligand is conjugated to the 3′ end of the sense strand of the double-stranded ribonucleic acid RNAi agent.

65. The method of claim 63, wherein the ligand is an N-acetylgalactosamine (GalNAc) derivative.

66. The method of claim 65, wherein the ligand is

[chemical structure]

67. The method of claim 65, wherein the double-stranded ribonucleic acid RNAi agent is conjugated to the ligand as shown in the following schematic [chemical structure]
and, wherein X is O or S.

68. The method of claim 67, wherein the X is O.

69.-72. (canceled)

73. The method of claim 1, further comprising administering an additional therapeutic agent to the subject.

74.-76. (canceled)

77. The method of claim 1, wherein the RNAi agent is administered as a pharmaceutical composition.

78.-82. (canceled)

83. A kit for performing the method of claim 1, comprising
a) the double-stranded RNAi agent, and
b) instructions for use, and
c) optionally, means for administering the double-stranded RNAi agent to the subject.

The application's sequence listing, which the Patent Office published only in electronic form, follows.

SEQUENCE LISTING (688 sequences)

SEQ ID NO: 1 - DNA, 3731 bp, Homo sapiens
  source 1..3731: mol_type = unassigned DNA
gtccgatggggctctggtggcgtgatctgcgcgccccaggcgtcaagcacccacaccctagaaggtttccgcagcgacgtcgaggcgctcatggttgcaggcgggcgccgccgttcagttcagggtctgagcctggaggagtgagccaggcagtgagactggctcgggcgggccgggacgcgtcgttgcagcagcggctcccagctcccagccaggattccgcgcgccccttcacgcgccctgctcctgaacttcagctcctgcacagtcctccccaccgcaaggctcaaggcgccgccggcgtggaccgcgcacggcctctaggtctcctcgccaggacagcaacctctcccctggccctcatgggcaccgtcagctccaggcggtcctggtggccgctgccactgctgctgctgctgctgctgctcctgggtcccgcgggcgcccgtgcgcaggaggacgaggacggcgactacgaggagctggtgctagccttgcgttccgaggaggacggcctggccgaagcacccgagcacggaaccacagccaccttccaccgctgcgccaaggatccgtggaggttgcctggcacctacgtggtggtgctgaaggaggagacccacctctcgcagtcagagcgcactgcccgccgcctgcaggcccaggctgcccgccggggatacctcaccaagatcctgcatgtcttccatggccttcttcctggcttcctggtgaagatgagtggcgacctgctggagctggccttgaagttgccccatgtcgactacatcgaggaggactcctctgtctttgcccagagcatcccgtggaacctggagcggattacccctccacggtaccgggcggatgaataccagccccccgacggaggcagcctggtggaggtgtatctcctagacaccagcatacagagtgaccaccgggaaatcgagggcagggtcatggtcaccgacttcgagaatgtgcccgaggaggacgggacccgcttccacagacaggccagcaagtgtgacagtcatggcacccacctggcaggggtggtcagcggccgggatgccggcgtggccaagggtgccagcatgcgcagcctgcgcgtgctcaactgccaagggaagggcacggttagcggcaccctcataggcctggagtttattcggaaaagccagctggtccagcctgtggggccactggtggtgctgctgcccctggcgggtgggtacagccgcgtcctcaacgccgcctgccagcgcctggcgagggctggggtcgtgctggtcaccgctgccggcaacttccgggacgatgcctgcctctactccccagcctcagctcccgaggtcatcacagttggggccaccaatgcccaagaccagccggtgaccctggggactttggggaccaactttggccgctgtgtggacctctttgccccaggggaggacatcattggtgcctccagcgactgcagcacctgctttgtgtcacagagtgggacatcacaggctgctgcccacgtggctggcattgcagccatgatgctgtctgccgagccggagctcaccctggccgagttgaggcagagactgatccacttctctgccaaagatgtcatcaatgaggcctggttccctgaggaccagcgggtactgacccccaacctggtggccgccctgccccccagcacccatggggcaggttggcagctgttttgcaggactgtatggtcagcacactcggggcctacacggatggccacagccgtcgcccgctgcgccccagatgaggagctgctgagctgctccagtttctccaggagtgggaagcggcggggcgagcgcatggaggcccaagggggcaagctggtctgccgggcccacaacgcttttgggggtgagggtgtctacgccattgccaggtgctgcctgctaccccaggccaactgcagcgtccacacagctccaccagctgaggccagcatggggacccgtgtccactgccaccaacagggccacgtcctcacaggctgcagctcccactgggaggtggaggaccttggcacccacaagccgcctgtgctgaggccacgaggtcagcccaaccagtgcgtgggccacagggaggccagcatccacgcttcctgctgccatgccccaggtctggaatgcaaagtcaaggagcatggaatcccggcccctcaggagcaggtgaccgtggcctgcgaggagggctggaccctgactggctgcagtgccctccctgggacctcccacgtcctgggggcctacgccgtagacaacacgtgtgtagtcaggagccgggacgtcagcactacaggcagcaccagcgaaggggccgtgacagccgttgccatctgctgccggagccggcacctggcgcaggcctcccaggagctccagtgacagccccatcccaggatgggtgtctggggagggtcaagggctggggctgagctttaaaatggttccgacttgtccctctctcagccctccatggcctggcacgaggggatggggatgcttccgcctttccggggctgctggcctggcccttgagtggggcagcctccttgcctggaactcactcactctgggtgcctcctccccaggtggaggtgccaggaagctccctccctcactgtggggcatttcaccattcaaacaggtcgagctgtgctcgggtgctgccagctgctcccaatgtgccgatgtccgtgggcagaatgacttttattgagctcttgttccgtgccaggcattcaatcctcaggtctccaccaaggaggcaggattcttcccatggataggggagggggcggtaggggctgcagggacaaacatcgttggggggtgagtgtgaaaggtgctgatggccctcatctccagctaactgtggagaagcccctgggggctccctgattaatggaggcttagctttctggatggcatctagccagaggctggagacaggtgcgcccctggtggtcacaggctgtgccttggtttcctgagccacctttactctgctctatgccaggctgtgctagcaacacccaaaggtggcctgcggggagccatcacctaggactgactcggcagtgtgcagtggtgcatgcactgtctcagccaacccgctccactacccggcagggtacacattcgcacccctacttcacagaggaagaaacctggaaccagagggggcgtgcctgccaagctcacacagcaggaactgagccagaaacgcagattgggctggctctgaagccaagcctcttcttacttcacccggctgggctcctcatttttacgggtaacagtgaggctgggaaggggaacacagaccaggaagctcggtgagtgatggcagaacgatgcctgcaggcatggaactttttccgttatcacccaggcctgattcactggcctggcggagatgcttctaaggcatggtcgggggagagggccaacaactgtccctccttgagcaccagccccacccaagcaagcagacatttatcttttgggtctgtcctctctgttgcctttttacagccaacttttctagacctgttttgcttttgtaacttgaagatatttattctgggttttgtagcatttttattaatatggtgactttttaaaataaaaacaaacaaacgttgtcctaacaaaaaaaaaaaaaaaaaaaaa

SEQ ID NO: 2 - DNA, 3731 bp, Homo sapiens
  source 1..3731: mol_type = unassigned DNA
tttttttttttttttttttttgttaggacaacgtttgtttgtttttattttaaaaagtcaccatattaataaaaatgctacaaaacccagaataaatatcttcaagttacaaaagcaaaacaggtctagaaaagttggctgtaaaaaggcaacagagaggacagacccaaaagataaatgtctgcttgcttgggtggggctggtgctcaaggagggacagttgttggccctctcccccgaccatgccttagaagcatctccgccaggccagtgaatcaggcctgggtgataacggaaaaagttccatgcctgcaggcatcgttctgccatcactcaccgagcttcctggtctgtgttccccttcccagcctcactgttacccgtaaaaatgaggagcccagccgggtgaagtaagaagaggcttggcttcagagccagcccaatctgcgtttctggctcagttcctgctgtgtgagcttggcaggcacgccccctctggttccaggtttcttcctctgtgaagtaggggtgcgaatgtgtaccctgccgggtagtggagcgggttggctgagacagtgcatgcaccactgcacactgccgagtcagtcctaggtgatggctccccgcaggccacctttgggtgttgctagcacagcctggcatagagcagagtaaaggtggctcaggaaaccaaggcacagcctgtgaccaccaggggcgcacctgtctccagcctctggctagatgccatccagaaagctaagcctccattaatcagggagcccccaggggcttctccacagttagctggagatgagggccatcagcacctttcacactcaccccccaacgatgtttgtccctgcagcccctaccgccccctcccctatccatgggaagaatcctgcctccttggtggagacctgaggattgaatgcctggcacggaacaagagctcaataaaagtcattctgcccacggacatcggcacattgggagcagctggcagcacccgagcacagctcgacctgtttgaatggtgaaatgccccacagtgagggagggagcttcctggcacctccacctggggaggaggcacccagagtgagtgagttccaggcaaggaggctgccccactcaagggccaggccagcagccccggaaaggcggaagcatccccatcccctcgtgccaggccatggagggctgagagagggacaagtcggaaccattttaaagctcagccccagcccttgaccctccccagacacccatcctgggatggggctgtcactggagctcctgggaggcctgcgccaggtgccggctccggcagcagatggcaacggctgtcacggccccttcgctggtgctgcctgtagtgctgacgtcccggctcctgactacacacgtgttgtctacggcgtaggcccccaggacgtgggaggtcccagggagggcactgcagccagtcagggtccagccctcctcgcaggccacggtcacctgctcctgaggggccgggattccatgctccttgactttgcattccagacctggggcatggcagcaggaagcgtggatgctggcctccctgtggcccacgcactggttgggctgacctcgtggcctcagcacaggcggcttgtgggtgccaaggtcctccacctcccagtgggagctgcagcctgtgaggacgtggccctgttggtggcagtggacacgggtccccatgctggcctcagctggtggagctgtgtggacgctgcagttggcctggggtagcaggcagcacctggcaatggcgtagacaccctcacccccaaaagcgttgtgggcccggcagaccagcttgcccccttgggcctccatgcgctcgccccgccgcttcccactcctggagaaactggagcagctcagcagctcctcatctggggcgcagcgggcgacggctgtggccatccgtgtaggccccgagtgtgctgaccatacagtcctgcaaaacagctgccaacctgccccatgggtgctggggggcagggcggccaccaggttgggggtcagtacccgctggtcctcagggaaccaggcctcattgatgacatctttggcagagaagtggatcagtctctgcctcaactcggccagggtgagctccggctcggcagacagcatcatggctgcaatgccagccacgtgggcagcagcctgtgatgtcccactctgtgacacaaagcaggtgctgcagtcgctggaggcaccaatgatgtcctcccctggggcaaagaggtccacacagcggccaaagttggtccccaaagtccccagggtcaccggctggtcttgggcattggtggccccaactgtgatgacctcgggagctgaggctggggagtagaggcaggcatcgtcccggaagttgccggcagcggtgaccagcacgaccccagccctcgccaggcgctggcaggcggcgttgaggacgcggctgtacccacccgccaggggcagcagcaccaccagtggccccacaggctggaccagctggcttttccgaataaactccaggcctatgagggtgccgctaaccgtgcccttcccttggcagttgagcacgcgcaggctgcgcatgctggcacccttggccacgccggcatcccggccgctgaccacccctgccaggtgggtgccatgactgtcacacttgctggcctgtctgtggaagcgggtcccgtcctcctcgggcacattctcgaagtcggtgaccatgaccctgccctcgatttcccggtggtcactctgtatgctggtgtctaggagatacacctccaccaggctgcctccgtcggggggctggtattcatccgcccggtaccgtggaggggtaatccgctccaggttccacgggatgctctgggcaaagacagaggagtcctcctcgatgtagtcgacatggggcaacttcaaggccagctccagcaggtcgccactcatcttcaccaggaagccaggaagaaggccatggaagacatgcaggatcttggtgaggtatccccggcgggcagcctgggcctgcaggcggcgggcagtgcgctctgactgcgagaggtgggtctcctccttcagcaccaccacgtaggtgccaggcaacctccacggatccttggcgcagcggtggaaggtggctgtggttccgtgctcgggtgcttcggccaggccgtcctcctcggaacgcaaggctagcaccagctcctcgtagtcgccgtcctcgtcctcctgcgcacgggcgcccgcgggacccaggagcagcagcagcagcagcagcagtggcagcggccaccaggaccgcctggagctgacggtgcccatgagggccaggggagaggttgctgtcctggcgaggagacctagaggccgtgcgcggtccacgccggcggcgccttgagccttgcggtggggaggactgtgcaggagctgaagttcaggagcagggcgcgtgaaggggcgcgcggaatcctggctgggagctgggagccgctgctgcaacgacgcgtcccggcccgcccgagccagtctcactgcctggctcactcctccaggctcagaccctgaactgaacggcggcgcccgcctgcaaccatgagcgcctcgacgtcgctgcggaaaccttctagggtgtgggtgcttgacgcctggggcgcgcagatcacgccaccagagccccatcggac

SEQ ID NO: 3 - protein, 16 aa, unidentified
  source 1..16: note = Description of Unknown: RFGF peptide
AAVALLPAVLLALLAP

SEQ ID NO: 4 - protein, 11 aa, unidentified
  source 1..11: note = Description of Unknown: RFGF analogue peptide
AALLPVLLAAP

SEQ ID NO: 5 - protein, 13 aa, Human immunodeficiency virus
GRKKRRQRRRPPQ

SEQ ID NO: 6 - protein, 16 aa, Drosophila sp.
RQIKIWFQNRRMKWKK

SEQ ID NO: 7 - RNA, 21 nt, synthetic construct
  source 1..21: mol_type = other RNA; note = Description of Artificial Sequence: Synthetic oligonucleotide
  modified_base 1: mod_base = OTHER; note = 2'-fluorocytidine-3'-phosphate
  modified_base 2: mod_base = OTHER; note = 2'-O-methyladenosine-3'-phosphate
  modified_base 3: mod_base = OTHER; note = 2'-fluoroadenosine-3'-phosphate
  modified_base 4: mod_base = OTHER; note = 2'-O-methylguanosine-3'-phosphate
  modified_base 5: mod_base = OTHER; note = 2'-fluorocytidine-3'-phosphate
  modified_base 6: mod_base = OTHER; note = 2'-O-methyladenosine-3'-phosphate
  modified_base 7: mod_base = OTHER; note = 2'-fluoroguanosine-3'-phosphate
  modified_base 8: mod_base = OTHER; note = 2'-O-methyladenosine-3'-phosphate
  modified_base 9: mod_base = OTHER; note = 2'-fluorocytidine-3'-phosphate
  modified_base 10: mod_base = OTHER; note = 2'-fluoroadenosine-3'-phosphate
  modified_base 11: mod_base = OTHER; note = 2'-fluorouridine-3'-phosphate
  modified_base 12: mod_base = OTHER; note = 2'-O-methyluridine-3'-phosphate
  modified_base 13: mod_base = OTHER; note = 2'-fluorouridine-3'-phosphate
  modified_base 14: mod_base = OTHER; note = 2'-O-methyladenosine-3'-phosphate
  modified_base 15: mod_base = OTHER; note = 2'-fluorouridine-3'-phosphate
  modified_base 16: mod_base = OTHER; note = 2'-O-methylcytidine-3'-phosphate
  modified_base 17: mod_base = OTHER; note = 2'-fluorouridine-3'-phosphate
  modified_base 18: mod_base = OTHER; note = 2'-O-methyluridine-3'-phosphate
  modified_base 19: mod_base = OTHER; note = 2'-fluorouridine-3'-phosphate
  modified_base 20: mod_base = OTHER; note = 2'-O-methyluridine-3'-phosphate
  modified_base 21: mod_base = OTHER; note = 2'-fluorouridine-3'-phosphate N-[tris(GalNAc-alkyl)-amidodecanoyl)]-4-hydroxyprolinol Hyp-(GalNAc-alkyl)3
caagcagacatttatcttttt

SEQ ID NO: 8 - RNA, 23 nt, synthetic construct
  source 1..23: mol_type = other RNA; note = Description of Artificial Sequence: Synthetic oligonucleotide
  modified_base 1: mod_base = OTHER; note = 2'-O-methyladenosine-3'-phosphate
  modified_base 2: mod_base = OTHER; note = 2'-fluoroadenosine-3'-phosphate
  modified_base 3: mod_base = OTHER; note = 2'-O-methyladenosine-3'-phosphate
  modified_base 4: mod_base = OTHER; note = 2'-fluoroadenosine-3'-phosphate
  modified_base 5: mod_base = OTHER; note = 2'-O-methyladenosine-3'-phosphate
  modified_base 6: mod_base = OTHER; note = 2'-fluoroguanosine-3'-phosphate
  modified_base 7: mod_base = OTHER; note = 2'-O-methyladenosine-3'-phosphate
  modified_base 8: mod_base = OTHER; note = 2'-fluorouridine-3'-phosphate
  modified_base 9: mod_base = OTHER; note = 2'-O-methyladenosine-3'-phosphate
  modified_base 10: mod_base = OTHER; note = 2'-fluoroadenosine-3'-phosphate
  modified_base 11: mod_base = OTHER; note = 2'-O-methyladenosine-3'-phosphate
  modified_base 12: mod_base = OTHER; note = 2'-O-methyluridine-3'-phosphate
  modified_base 13: mod_base = OTHER; note = 2'-O-methylguanosine-3'-phosphate
  modified_base 14: mod_base = OTHER; note = 2'-fluorouridine-3'-phosphate
  modified_base 15: mod_base = OTHER; note = 2'-O-methylcytidine-3'-phosphate
  modified_base 16: mod_base = OTHER; note = 2'-fluorouridine-3'-phosphate
  modified_base 17: mod_base = OTHER; note = 2'-O-methylguanosine-3'-phosphate
  modified_base 18: mod_base = OTHER; note = 2'-fluorocytidine-3'-phosphate
  modified_base 19: mod_base = OTHER; note = 2'-O-methyluridine-3'-phosphate
  modified_base 20: mod_base = OTHER; note = 2'-fluorouridine-3'-phosphate
  modified_base 21: mod_base = OTHER; note = 2'-O-methylguanosine-3'-phosphorothioate
  modified_base 22: mod_base = OTHER; note = 2'-fluorocytidine-3'-phosphorothioate
  modified_base 23: mod_base = OTHER; note = 2'-O-methyluridine-3'-phosphate
aaaaagataaatgtctgcttgct

SEQ ID NO: 9 - RNA, 21 nt, synthetic construct
  source 1..21: mol_type = other RNA; note = Description of Artificial Sequence: Synthetic oligonucleotide
  modified_base 1: mod_base = OTHER; note = 2'-fluorocytidine-3'-phosphate
  modified_base 2: mod_base = OTHER; note = 2'-O-methyladenosine-3'-phosphate
  modified_base 3: mod_base = OTHER; note = 2'-fluoroadenosine-3'-phosphate
  modified_base 4: mod_base = OTHER; note = 2'-O-methylguanosine-3'-phosphate
  modified_base 5: mod_base = OTHER; note = 2'-fluorocytidine-3'-phosphate
  modified_base 6: mod_base = OTHER; note = 2'-O-methyladenosine-3'-phosphate
  modified_base 7: mod_base = OTHER; note = 2'-fluoroguanosine-3'-phosphate
  modified_base 8: mod_base = OTHER; note = 2'-O-methyladenosine-3'-phosphate
  modified_base 9: mod_base = OTHER; note = 2'-fluorocytidine-3'-phosphate
  modified_base 10: mod_base = OTHER; note = 2'-fluoroadenosine-3'-phosphate
  modified_base 11: mod_base = OTHER; note = 2'-fluorouridine-3'-phosphate
  modified_base 12: mod_base = OTHER; note = 2'-O-methyluridine-3'-phosphate
  modified_base 13: mod_base = OTHER; note = 2'-fluorouridine-3'-phosphate
  modified_base 14: mod_base = OTHER; note = 2'-O-methyladenosine-3'-phosphate
  modified_base 15: mod_base = OTHER; note = 2'-fluorouridine-3'-phosphate
  modified_base 16: mod_base = OTHER; note = 2'-O-methylcytidine-3'-phosphate
  modified_base 17: mod_base = OTHER; note = 2'-fluorouridine-3'-phosphate
  modified_base 18: mod_base = OTHER; note = 2'-O-methyluridine-3'-phosphate
  modified_base 19: mod_base = OTHER; note = 2'-fluorouridine-3'-phosphate
  modified_base 20: mod_base = OTHER; note = 2'-O-methyluridine-3'-phosphate
  modified_base 21: mod_base = OTHER; note = 2'-fluorouridine-3'-phosphate N-[tris(GalNAc-alkyl)-amidodecanoyl)]-4-hydroxyprolinol Hyp-(GalNAc-alkyl)3
caagcagacatttatcttttt

SEQ ID NO: 10 - RNA, 23 nt, synthetic construct
  source 1..23: mol_type = other RNA; note = Description of Artificial Sequence: Synthetic oligonucleotide
  modified_base 1: mod_base = OTHER; note = 2'-O-methyladenosine-3'-phosphate
  modified_base 2: mod_base = OTHER; note = 2'-fluoroadenosine-3'-phosphate
  modified_base 3: mod_base = OTHER; note = 2'-O-methyladenosine-3'-phosphate
  modified_base 4: mod_base = OTHER; note = 2'-fluoroadenosine-3'-phosphate
  modified_base 5: mod_base = OTHER; note = 2'-O-methyladenosine-3'-phosphate
  modified_base 6: mod_base = OTHER; note = 2'-fluoroguanosine-3'-phosphate
  modified_base 7: mod_base = OTHER; note = 2'-O-methyladenosine-3'-phosphate
  modified_base 8: mod_base = OTHER; note = 2'-fluorouridine-3'-phosphate
  modified_base 9: mod_base = OTHER; note = 2'-O-methyladenosine-3'-phosphate
  modified_base 10: mod_base = OTHER; note = 2'-fluoroadenosine-3'-phosphate
  modified_base 11: mod_base = OTHER; note = 2'-O-methyladenosine-3'-phosphate
  modified_base 12: mod_base = OTHER; note = 2'-O-methyluridine-3'-phosphate
  modified_base 13: mod_base = OTHER; note = 2'-O-methylguanosine-3'-phosphate
  modified_base 14: mod_base = OTHER; note = 2'-fluorouridine-3'-phosphate
  modified_base 15: mod_base = OTHER; note = 2'-O-methylcytidine-3'-phosphate
  modified_base 16: mod_base = OTHER; note = 2'-fluorouridine-3'-phosphate
  modified_base 17: mod_base = OTHER; note = 2'-O-methylguanosine-3'-phosphate
  modified_base 18: mod_base = OTHER; note = 2'-fluorocytidine-3'-phosphate
  modified_base 19: mod_base = OTHER; note = 2'-O-methyluridine-3'-phosphate
  modified_base 20: mod_base = OTHER; note = 2'-fluorouridine-3'-phosphate
  modified_base 21: mod_base = OTHER; note = 2'-O-methylguanosine-3'-phosphorothioate
  modified_base 22: mod_base = OTHER; note = 2'-fluorocytidine-3'-phosphorothioate
  modified_base 23: mod_base = OTHER; note = 2'-O-methyluridine-3'-phosphate
aaaaagataaatgtctgcttgct

SEQ ID NO: 11 - RNA, 21 nt, synthetic construct
  source 1..21: mol_type = other RNA; note = Description of Artificial Sequence: Synthetic oligonucleotide
  modified_base 1: mod_base = OTHER; note = 2'-fluorocytidine-3'-phosphate
  modified_base 2: mod_base = OTHER; note = 2'-O-methyladenosine-3'-phosphate
  modified_base 3: mod_base = OTHER; note = 2'-fluoroadenosine-3'-phosphate
  modified_base 4: mod_base = OTHER; note = 2'-O-methylguanosine-3'-phosphate
  modified_base 5: mod_base = OTHER; note = 2'-fluorocytidine-3'-phosphate
  modified_base 6: mod_base = OTHER; note = 2'-O-methyladenosine-3'-phosphate
  modified_base 7: mod_base = OTHER; note = 2'-fluoroguanosine-3'-phosphate
  modified_base 8: mod_base = OTHER; note = 2'-O-methyladenosine-3'-phosphate
  modified_base 9: mod_base = OTHER; note = 2'-fluorocytidine-3'-phosphate
  modified_base 10: mod_base = OTHER; note = 2'-fluoroadenosine-3'-phosphate
  modified_base 11: mod_base = OTHER; note = 2'-fluorouridine-3'-phosphate
  modified_base 12: mod_base = OTHER; note = 2'-O-methyluridine-3'-phosphate
  modified_base 13: mod_base = OTHER; note = 2'-fluorouridine-3'-phosphate
  modified_base 14: mod_base = OTHER; note = 2'-O-methyladenosine-3'-phosphate
  modified_base 15: mod_base = OTHER; note = 2'-fluorouridine-3'-phosphate
  modified_base 16: mod_base = OTHER; note = 2'-O-methylcytidine-3'-phosphate
  modified_base 17: mod_base = OTHER; note = 2'-fluorouridine-3'-phosphate
  modified_base 18: mod_base = OTHER; note = 2'-O-methyluridine-3'-phosphate
  modified_base 19: mod_base = OTHER; note = 2'-fluorouridine-3'-phosphate
  modified_base 20: mod_base = OTHER; note = 2'-O-methyluridine-3'-phosphate
  modified_base 21: mod_base = OTHER; note = 2'-fluorouridine-3'-phosphate N-[tris(GalNAc-alkyl)-amidodecanoyl)]-4-hydroxyprolinol Hyp-(GalNAc-alkyl)3
caagcagacatttatcttttt

SEQ ID NO: 12 - RNA, 23 nt, synthetic construct
  source 1..23: mol_type = other RNA; note = Description of Artificial Sequence: Synthetic oligonucleotide
  modified_base 1: mod_base = OTHER; note = 2'-O-methyladenosine-3'-phosphate
  modified_base 2: mod_base = OTHER; note = 2'-fluoroadenosine-3'-phosphate
  modified_base 3: mod_base = OTHER; note = 2'-O-methyladenosine-3'-phosphate
  modified_base 4: mod_base = OTHER; note = 2'-fluoroadenosine-3'-phosphate
  modified_base 5: mod_base = OTHER; note = 2'-O-methyladenosine-3'-phosphate
  modified_base 6: mod_base = OTHER; note = 2'-fluoroguanosine-3'-phosphate
  modified_base 7: mod_base = OTHER; note = 2'-O-methyladenosine-3'-phosphate
  modified_base 8: mod_base = OTHER; note = 2'-fluorouridine-3'-phosphate
  modified_base 9: mod_base = OTHER; note = 2'-O-methyladenosine-3'-phosphate
  modified_base 10: mod_base = OTHER; note = 2'-fluoroadenosine-3'-phosphate
  modified_base 11: mod_base = OTHER; note = 2'-O-methyladenosine-3'-phosphate
  modified_base 12: mod_base = OTHER; note = 2'-O-methyluridine-3'-phosphate
  modified_base 13: mod_base = OTHER; note = 2'-O-methylguanosine-3'-phosphate
  modified_base 14: mod_base = OTHER; note = 2'-fluorouridine-3'-phosphate
  modified_base 15: mod_base = OTHER; note = 2'-O-methylcytidine-3'-phosphate
  modified_base 16: mod_base = OTHER; note = 2'-fluorouridine-3'-phosphate
  modified_base 17: mod_base = OTHER; note = 2'-O-methylguanosine-3'-phosphate
  modified_base 18: mod_base = OTHER; note = 2'-fluorocytidine-3'-phosphate
  modified_base 19: mod_base = OTHER; note = 2'-O-methyluridine-3'-phosphate
  modified_base 20: mod_base = OTHER; note = 2'-fluorouridine-3'-phosphate
  modified_base 21: mod_base = OTHER; note = 2'-O-methylguanosine-3'-phosphorothioate
  modified_base 22: mod_base = OTHER; note = 2'-fluorocytidine-3'-phosphorothioate
  modified_base 23: mod_base = OTHER; note = 2'-O-methyluridine-3'-phosphate
aaaaagataaatgtctgcttgct

SEQ ID NO: 13 - RNA, 21 nt, synthetic construct
  source 1..21: mol_type = other RNA; note = Description of Artificial Sequence: Synthetic oligonucleotide
  modified_base 1: mod_base = OTHER; note = 2'-fluorocytidine-3'-phosphate
  modified_base 2: mod_base = OTHER; note = 2'-O-methyladenosine-3'-phosphate
  modified_base 3: mod_base = OTHER; note = 2'-fluoroadenosine-3'-phosphate
  modified_base 4: mod_base = OTHER; note = 2'-O-methylguanosine-3'-phosphate
  modified_base 5: mod_base = OTHER; note = 2'-fluorocytidine-3'-phosphate
  modified_base 6: mod_base = OTHER; note = 2'-O-methyladenosine-3'-phosphate
  modified_base 7: mod_base = OTHER; note = 2'-fluoroguanosine-3'-phosphate
  modified_base 8: mod_base = OTHER; note = 2'-O-methyladenosine-3'-phosphate
  modified_base 9: mod_base = OTHER; note = 2'-fluorocytidine-3'-phosphate
  modified_base 10: mod_base = OTHER; note = 2'-fluoroadenosine-3'-phosphate
  modified_base 11: mod_base = OTHER; note = 2'-fluorouridine-3'-phosphate
  modified_base 12: mod_base = OTHER; note = 2'-O-methyluridine-3'-phosphate
  modified_base 13: mod_base = OTHER; note = 2'-fluorouridine-3'-phosphate
  modified_base 14: mod_base = OTHER; note = 2'-O-methyladenosine-3'-phosphate
  modified_base 15: mod_base = OTHER; note = 2'-fluorouridine-3'-phosphate
  modified_base 16: mod_base = OTHER; note = 2'-O-methylcytidine-3'-phosphate
  modified_base 17: mod_base = OTHER; note = 2'-fluorouridine-3'-phosphate
  modified_base 18: mod_base = OTHER; note = 2'-O-methyluridine-3'-phosphate
  modified_base 19: mod_base = OTHER; note = 2'-fluorouridine-3'-phosphate
  modified_base 20: mod_base = OTHER; note = 2'-O-methyluridine-3'-phosphate
  modified_base 21: mod_base = OTHER; note = 2'-fluorouridine-3'-phosphate N-[tris(GalNAc-alkyl)-amidodecanoyl)]-4-hydroxyprolinol Hyp-(GalNAc-alkyl)3
caagcagacatttatcttttt

SEQ ID NO: 14 - RNA, 23 nt, synthetic construct
  source 1..23: mol_type = other RNA; note = Description of Artificial Sequence: Synthetic oligonucleotide
  modified_base 1: mod_base = OTHER; note = 2'-O-methyladenosine-3'-phosphate
  modified_base 2: mod_base = OTHER; note = 2'-fluoroadenosine-3'-phosphate
  modified_base 3: mod_base = OTHER; note = 2'-O-methyladenosine-3'-phosphate
  modified_base 4: mod_base = OTHER; note = 2'-fluoroadenosine-3'-phosphate
  modified_base 5: mod_base = OTHER; note = 2'-O-methyladenosine-3'-phosphate
  modified_base 6: mod_base = OTHER; note = 2'-fluoroguanosine-3'-phosphate
  modified_base 7: mod_base = OTHER; note = 2'-O-methyladenosine-3'-phosphate
  modified_base 8: mod_base = OTHER; note = 2'-fluorouridine-3'-phosphate
  modified_base 9: mod_base = OTHER; note = 2'-O-methyladenosine-3'-phosphate
  modified_base 10: mod_base = OTHER; note = 2'-fluoroadenosine-3'-phosphate
  modified_base 11: mod_base = OTHER; note = 2'-O-methyladenosine-3'-phosphate
  modified_base 12: mod_base = OTHER; note = 2'-O-methyluridine-3'-phosphate
  modified_base 13: mod_base = OTHER; note = 2'-O-methylguanosine-3'-phosphate
  modified_base 14: mod_base = OTHER; note = 2'-fluorouridine-3'-phosphate
  modified_base 15: mod_base = OTHER; note = 2'-O-methylcytidine-3'-phosphate
  modified_base 16: mod_base = OTHER; note = 2'-fluorouridine-3'-phosphate
  modified_base 17: mod_base = OTHER; note = 2'-O-methylguanosine-3'-phosphate
  modified_base 18: mod_base = OTHER; note = 2'-fluorocytidine-3'-phosphate
  modified_base 19: mod_base = OTHER; note = 2'-O-methyluridine-3'-phosphate
  modified_base 20: mod_base = OTHER; note = 2'-fluorouridine-3'-phosphate
  modified_base 21: mod_base = OTHER; note = 2'-O-methylguanosine-3'-phosphorothioate
  modified_base 22: mod_base = OTHER; note = 2'-fluorocytidine-3'-phosphorothioate
  modified_base 23: mod_base = OTHER; note = 2'-O-methyluridine-3'-phosphate
aaaaagataaatgtctgcttgct

SEQ ID NO: 15 - RNA, 21 nt, synthetic construct
  source 1..21: mol_type = other RNA; note = Description of Artificial Sequence: Synthetic oligonucleotide
  modified_base 1: mod_base = OTHER; note = 2'-fluorocytidine-3'-phosphate
  modified_base 2: mod_base = OTHER; note = 2'-O-methyladenosine-3'-phosphate
  modified_base 3: mod_base = OTHER; note = 2'-fluoroadenosine-3'-phosphate
  modified_base 4: mod_base = OTHER; note = 2'-O-methylguanosine-3'-phosphate
  modified_base 5: mod_base = OTHER; note = 2'-fluorocytidine-3'-phosphate
  modified_base 6: mod_base = OTHER; note = 2'-O-methyladenosine-3'-phosphate
  modified_base 7: mod_base = OTHER; note = 2'-fluoroguanosine-3'-phosphate
  modified_base 8: mod_base = OTHER; note = 2'-O-methyladenosine-3'-phosphate
  modified_base 9: mod_base = OTHER; note = 2'-fluorocytidine-3'-phosphate
  modified_base 10: mod_base = OTHER; note = 2'-fluoroadenosine-3'-phosphate
  modified_base 11: mod_base = OTHER; note = 2'-fluorouridine-3'-phosphate
  modified_base 12: mod_base = OTHER; note = 2'-O-methyluridine-3'-phosphate
  modified_base 13: mod_base = OTHER; note = 2'-fluorouridine-3'-phosphate
  modified_base 14: mod_base = OTHER; note = 2'-O-methyladenosine-3'-phosphate
  modified_base 15: mod_base = OTHER; note = 2'-fluorouridine-3'-phosphate
  modified_base 16: mod_base = OTHER; note = 2'-O-methylcytidine-3'-phosphate
  modified_base 17: mod_base = OTHER; note = 2'-fluorouridine-3'-phosphate
  modified_base 18: mod_base = OTHER; note = 2'-O-methyluridine-3'-phosphate
  modified_base 19: mod_base = OTHER; note = 2'-fluorouridine-3'-phosphate
  modified_base 20: mod_base = OTHER; note = 2'-O-methyluridine-3'-phosphate
  modified_base 21: mod_base = OTHER; note = 2'-fluorouridine-3'-phosphate N-[tris(GalNAc-alkyl)-amidodecanoyl)]-4-hydroxyprolinol Hyp-(GalNAc-alkyl)3
caagcagacatttatcttttt

SEQ ID NO: 16 - RNA, 23 nt, synthetic construct
  source 1..23: mol_type = other RNA; note = Description of Artificial Sequence: Synthetic oligonucleotide
  modified_base 1: mod_base = OTHER; note = 2'-O-methyladenosine-3'-phosphate
  modified_base 2: mod_base = OTHER; note = 2'-fluoroadenosine-3'-phosphate
  modified_base 3: mod_base = OTHER; note = 2'-O-methyladenosine-3'-phosphate
  modified_base 4: mod_base = OTHER; note = 2'-fluoroadenosine-3'-phosphate
  modified_base 5: mod_base = OTHER; note = 2'-O-methyladenosine-3'-phosphate
  modified_base 6: mod_base = OTHER; note = 2'-fluoroguanosine-3'-phosphate
  modified_base 7: mod_base = OTHER; note = 2'-O-methyladenosine-3'-phosphate
  modified_base 8: mod_base = OTHER; note = 2'-fluorouridine-3'-phosphate
  modified_base 9: mod_base = OTHER; note = 2'-O-methyladenosine-3'-phosphate
  modified_base 10: mod_base = OTHER; note = 2'-fluoroadenosine-3'-phosphate
  modified_base 11: mod_base = OTHER; note = 2'-O-methyladenosine-3'-phosphate
  modified_base 12: mod_base = OTHER; note = 2'-O-methyluridine-3'-phosphate
  modified_base 13: mod_base = OTHER; note = 2'-O-methylguanosine-3'-phosphate
  modified_base 14: mod_base = OTHER; note = 2'-fluorouridine-3'-phosphate
  modified_base 15: mod_base = OTHER; note = 2'-O-methylcytidine-3'-phosphate
  modified_base 16: mod_base = OTHER; note = 2'-fluorouridine-3'-phosphate
  modified_base 17: mod_base = OTHER; note = 2'-O-methylguanosine-3'-phosphate
  modified_base 18: mod_base = OTHER; note = 2'-fluorocytidine-3'-phosphate
  modified_base 19: mod_base = OTHER; note = 2'-O-methyluridine-3'-phosphate
  modified_base 20: mod_base = OTHER; note = 2'-fluorouridine-3'-phosphate
  modified_base 21: mod_base = OTHER; note = 2'-O-methylguanosine-3'-phosphorothioate
  modified_base 22: mod_base = OTHER; note = 2'-fluorocytidine-3'-phosphorothioate
  modified_base 23: mod_base = OTHER; note = 2'-O-methyluridine-3'-phosphate
aaaaagataaatgtctgcttgct

SEQ ID NO: 17 - RNA, 21 nt, synthetic construct
  source 1..21: mol_type = other RNA; note = Description of Artificial Sequence: Synthetic oligonucleotide
  modified_base 1: mod_base = OTHER; note = 2'-fluorocytidine-3'-phosphate
  modified_base 2: mod_base = OTHER; note = 2'-O-methyladenosine-3'-phosphate
  modified_base 3: mod_base = OTHER; note = 2'-fluoroadenosine-3'-phosphate
  modified_base 4: mod_base = OTHER; note = 2'-O-methylguanosine-3'-phosphate
  modified_base 5: mod_base = OTHER; note = 2'-fluorocytidine-3'-phosphate
  modified_base 6: mod_base = OTHER; note = 2'-O-methyladenosine-3'-phosphate
  modified_base 7: mod_base = OTHER; note = 2'-fluoroguanosine-3'-phosphate
  modified_base 8: mod_base = OTHER; note = 2'-O-methyladenosine-3'-phosphate
  modified_base 9: mod_base = OTHER; note = 2'-fluorocytidine-3'-phosphate
  modified_base 10: mod_base = OTHER; note = 2'-fluoroadenosine-3'-phosphate
  modified_base 11: mod_base = OTHER; note = 2'-fluorouridine-3'-phosphate
  modified_base 12: mod_base = OTHER; note = 2'-O-methyluridine-3'-phosphate
  modified_base 13: mod_base = OTHER; note = 2'-fluorouridine-3'-phosphate
  modified_base 14: mod_base = OTHER; note = 2'-O-methyladenosine-3'-phosphate
  modified_base 15: mod_base = OTHER; note = 2'-fluorouridine-3'-phosphate
  modified_base 16: mod_base = OTHER; note = 2'-O-methylcytidine-3'-phosphate
  modified_base 17: mod_base = OTHER; note = 2'-fluorouridine-3'-phosphate
  modified_base 18: mod_base = OTHER; note = 2'-O-methyluridine-3'-phosphate
  modified_base 19: mod_base = OTHER; note = 2'-fluorouridine-3'-phosphate
  modified_base 20: mod_base = OTHER; note = 2'-O-methyluridine-3'-phosphate
  modified_base 21: mod_base = OTHER; note = 2'-fluorouridine-3'-phosphate N-[tris(GalNAc-alkyl)-amidodecanoyl)]-4-hydroxyprolinol Hyp-(GalNAc-alkyl)3
caagcagacatttatcttttt

SEQ ID NO: 18 - RNA, 23 nt, synthetic construct
  source 1..23: mol_type = other RNA; note = Description of Artificial Sequence: Synthetic oligonucleotide
  modified_base 1: mod_base = OTHER; note = 2'-O-methyladenosine-3'-phosphate
  modified_base 2: mod_base = OTHER; note = 2'-fluoroadenosine-3'-phosphate
  modified_base 3: mod_base = OTHER; note = 2'-O-methyladenosine-3'-phosphate
  modified_base 4: mod_base = OTHER; note = 2'-fluoroadenosine-3'-phosphate
  modified_base 5: mod_base = OTHER; note = 2'-O-methyladenosine-3'-phosphate
  modified_base 6: mod_base = OTHER; note = 2'-fluoroguanosine-3'-phosphate
  modified_base 7: mod_base = OTHER; note = 2'-O-methyladenosine-3'-phosphate
  modified_base 8: mod_base = OTHER; note = 2'-fluorouridine-3'-phosphate
  modified_base 9: mod_base = OTHER; note = 2'-O-methyladenosine-3'-phosphate
  modified_base 10: mod_base = OTHER; note = 2'-fluoroadenosine-3'-phosphate
  modified_base 11: mod_base = OTHER; note = 2'-O-methyladenosine-3'-phosphate
  modified_base 12: mod_base = OTHER; note = 2'-O-methyluridine-3'-phosphate
  modified_base 13: mod_base = OTHER; note = 2'-O-methylguanosine-3'-phosphate
  modified_base 14: mod_base = OTHER; note = 2'-fluorouridine-3'-phosphate
  modified_base 15: mod_base = OTHER; note = 2'-O-methylcytidine-3'-phosphate
  modified_base 16: mod_base = OTHER; note = 2'-fluorouridine-3'-phosphate
  modified_base 17: mod_base = OTHER; note = 2'-O-methylguanosine-3'-phosphate
  modified_base 18: mod_base = OTHER; note = 2'-fluorocytidine-3'-phosphate
  modified_base 19: mod_base = OTHER; note = 2'-O-methyluridine-3'-phosphate
  modified_base 20: mod_base = OTHER; note = 2'-fluorouridine-3'-phosphate
  modified_base 21: mod_base = OTHER; note = 2'-O-methylguanosine-3'-phosphorothioate
  modified_base 22: mod_base = OTHER; note = 2'-fluorocytidine-3'-phosphorothioate
  modified_base 23: mod_base = OTHER; note = 2'-O-methyluridine-3'-phosphate
aaaaagataaatgtctgcttgct

SEQ ID NO: 19 - RNA, 21 nt, synthetic construct
  source 1..21: mol_type = other RNA; note = Description of Artificial Sequence: Synthetic oligonucleotide
  modified_base 1: mod_base = OTHER; note = 2'-fluorocytidine-3'-phosphate
  modified_base 2: mod_base = OTHER; note = 2'-O-methyladenosine-3'-phosphate
  modified_base 3: mod_base = OTHER; note = 2'-fluoroadenosine-3'-phosphate
  modified_base 4: mod_base = OTHER; note = 2'-O-methylguanosine-3'-phosphate
  modified_base 5: mod_base = OTHER; note = 2'-fluorocytidine-3'-phosphate
  modified_base 6: mod_base = OTHER; note = 2'-O-methyladenosine-3'-phosphate
  modified_base 7: mod_base = OTHER; note = 2'-fluoroguanosine-3'-phosphate
  modified_base 8: mod_base = OTHER; note = 2'-O-methyladenosine-3'-phosphate
  modified_base 9: mod_base = OTHER; note = 2'-fluorocytidine-3'-phosphate
  modified_base 10: mod_base = OTHER; note = 2'-fluoroadenosine-3'-phosphate
  modified_base 11: mod_base = OTHER; note = 2'-fluorouridine-3'-phosphate
  modified_base 12: mod_base = OTHER; note = 2'-O-methyluridine-3'-phosphate
  modified_base 13: mod_base = OTHER; note = 2'-fluorouridine-3'-phosphate
  modified_base 14: mod_base = OTHER; note = 2'-O-methyladenosine-3'-phosphate
  modified_base 15: mod_base = OTHER; note = 2'-fluorouridine-3'-phosphate
  modified_base 16: mod_base = OTHER; note = 2'-O-methylcytidine-3'-phosphate
  modified_base 17: mod_base = OTHER; note = 2'-fluorouridine-3'-phosphate
  modified_base 18: mod_base = OTHER; note = 2'-O-methyluridine-3'-phosphate
  modified_base 19: mod_base = OTHER; note = 2'-fluorouridine-3'-phosphate
  modified_base 20: mod_base = OTHER; note = 2'-O-methyluridine-3'-phosphate
  modified_base 21: mod_base = OTHER; note = 2'-fluorouridine-3'-phosphate N-[tris(GalNAc-alkyl)-amidodecanoyl)]-4-hydroxyprolinol Hyp-(GalNAc-alkyl)3
caagcagacatttatcttttt

SEQ ID NO: 20 - RNA, 23 nt, synthetic construct
  source 1..23: mol_type = other RNA; note = Description of Artificial Sequence: Synthetic oligonucleotide
  modified_base 1: mod_base = OTHER; note = 2'-O-methyladenosine-3'-phosphate
  modified_base 2: mod_base = OTHER; note = 2'-fluoroadenosine-3'-phosphate
  modified_base 3: mod_base = OTHER; note = 2'-O-methyladenosine-3'-phosphate
  modified_base 4: mod_base = OTHER; note = 2'-fluoroadenosine-3'-phosphate
  modified_base 5: mod_base = OTHER; note = 2'-O-methyladenosine-3'-phosphate
  modified_base 6: mod_base = OTHER; note = 2'-fluoroguanosine-3'-phosphate
  modified_base 7: mod_base = OTHER; note = 2'-O-methyladenosine-3'-phosphate
  modified_base 8: mod_base = OTHER; note = 2'-fluorouridine-3'-phosphate
  modified_base 9: mod_base = OTHER; note = 2'-O-methyladenosine-3'-phosphate
  modified_base 10: mod_base = OTHER; note = 2'-fluoroadenosine-3'-phosphate
  modified_base 11: mod_base = OTHER; note = 2'-O-methyladenosine-3'-phosphate
  modified_base 12: mod_base = OTHER; note = 2'-O-methyluridine-3'-phosphate
  modified_base 13: mod_base = OTHER; note = 2'-O-methylguanosine-3'-phosphate
  modified_base 14: mod_base = OTHER; note = 2'-fluorouridine-3'-phosphate
  modified_base 15: mod_base = OTHER; note = 2'-O-methylcytidine-3'-phosphate
  modified_base 16: mod_base = OTHER; note = 2'-fluorouridine-3'-phosphate
  modified_base 17: mod_base = OTHER; note = 2'-O-methylguanosine-3'-phosphate
  modified_base 18: mod_base = OTHER; note = 2'-fluorocytidine-3'-phosphate
  modified_base 19: mod_base = OTHER; note = 2'-O-methyluridine-3'-phosphate
  modified_base 20: mod_base = OTHER; note = 2'-fluorouridine-3'-phosphate
  modified_base 21: mod_base = OTHER; note = 2'-O-methylguanosine-3'-phosphorothioate
  modified_base 22: mod_base = OTHER; note = 2'-fluorocytidine-3'-phosphorothioate
  modified_base 23: mod_base = OTHER; note = 2'-O-methyluridine-3'-phosphate
aaaaagataaatgtctgcttgct

SEQ ID NO: 21 - RNA, 21 nt, synthetic construct
  source 1..21: mol_type = other RNA; note = Description of Artificial Sequence: Synthetic oligonucleotide
  modified_base 1: mod_base = OTHER; note = 2'-fluorocytidine-3'-phosphate
  modified_base 2: mod_base = OTHER; note = 2'-O-methyladenosine-3'-phosphate
  modified_base 3: mod_base = OTHER; note = 2'-fluoroadenosine-3'-phosphate
  modified_base 4: mod_base = OTHER; note = 2'-O-methylguanosine-3'-phosphate
  modified_base 5: mod_base = OTHER; note = 2'-fluorocytidine-3'-phosphate
  modified_base 6: mod_base = OTHER; note = 2'-O-methyladenosine-3'-phosphate
  modified_base 7: mod_base = OTHER; note = 2'-fluoroguanosine-3'-phosphate
  modified_base 8: mod_base = OTHER; note = 2'-O-methyladenosine-3'-phosphate
  modified_base 9: mod_base = OTHER; note = 2'-fluorocytidine-3'-phosphate
  modified_base 10: mod_base = OTHER; note = 2'-fluoroadenosine-3'-phosphate
  modified_base 11: mod_base = OTHER; note = 2'-fluorouridine-3'-phosphate
  modified_base 12: mod_base = OTHER; note = 2'-O-methyluridine-3'-phosphate
  modified_base 13: mod_base = OTHER; note = 2'-fluorouridine-3'-phosphate
  modified_base 14: mod_base = OTHER; note = 2'-O-methyladenosine-3'-phosphate
  modified_base 15: mod_base = OTHER; note = 2'-fluorouridine-3'-phosphate
  modified_base 16: mod_base = OTHER; note = 2'-O-methylcytidine-3'-phosphate
  modified_base 17: mod_base = OTHER; note = 2'-fluorouridine-3'-phosphate
  modified_base 18: mod_base = OTHER; note = 2'-O-methyluridine-3'-phosphate
  modified_base 19: mod_base = OTHER; note = 2'-fluorouridine-3'-phosphate
  modified_base 20: mod_base = OTHER; note = 2'-O-methyluridine-3'-phosphate
  modified_base 21: mod_base = OTHER; note = 2'-fluorouridine-3'-phosphate N-[tris(GalNAc-alkyl)-amidodecanoyl)]-4-hydroxyprolinol Hyp-(GalNAc-alkyl)3
caagcagacatttatcttttt

SEQ ID NO: 22 - RNA, 23 nt, synthetic construct
  source 1..23: mol_type = other RNA; note = Description of Artificial Sequence: Synthetic oligonucleotide
  modified_base 1: mod_base = OTHER; note = 2'-O-methyladenosine-3'-phosphate
  modified_base 2: mod_base = OTHER; note = 2'-fluoroadenosine-3'-phosphate
  modified_base 3: mod_base = OTHER; note = 2'-O-methyladenosine-3'-phosphate
  modified_base 4: mod_base = OTHER; note = 2'-fluoroadenosine-3'-phosphate
  modified_base 5: mod_base = OTHER; note = 2'-O-methyladenosine-3'-phosphate
  modified_base 6: mod_base = OTHER; note = 2'-fluoroguanosine-3'-phosphate
  modified_base 7: mod_base = OTHER; note = 2'-O-methyladenosine-3'-phosphate
  modified_base 8: mod_base = OTHER; note = 2'-fluorouridine-3'-phosphate
  modified_base 9: mod_base = OTHER; note = 2'-O-methyladenosine-3'-phosphate
  modified_base 10: mod_base = OTHER; note = 2'-fluoroadenosine-3'-phosphate
  modified_base 11: mod_base = OTHER; note = 2'-O-methyladenosine-3'-phosphate
  modified_base 12: mod_base = OTHER; note = 2'-O-methyluridine-3'-phosphate
  modified_base 13: mod_base = OTHER; note = 2'-O-methylguanosine-3'-phosphate
  modified_base 14: mod_base = OTHER; note = 2'-fluorouridine-3'-phosphate
  modified_base 15: mod_base = OTHER; note = 2'-O-methylcytidine-3'-phosphate
  modified_base 16: mod_base = OTHER; note = 2'-fluorouridine-3'-phosphate
  modified_base 17: mod_base = OTHER; note = 2'-O-methylguanosine-3'-phosphate
  modified_base 18: mod_base = OTHER; note = 2'-fluorocytidine-3'-phosphate
  modified_base 19: mod_base = OTHER; note = 2'-O-methyluridine-3'-phosphate
  modified_base 20: mod_base = OTHER; note = 2'-fluorouridine-3'-phosphate
  modified_base 21: mod_base = OTHER; note = 2'-O-methylguanosine-3'-phosphorothioate
  modified_base 22: mod_base = OTHER; note = 2'-fluorocytidine-3'-phosphorothioate
  modified_base 23: mod_base = OTHER; note = 2'-O-methyluridine-3'-phosphate
aaaaagataaatgtctgcttgct

SEQ ID NO: 23 - RNA, 21 nt, synthetic construct
  source 1..21: mol_type = other RNA; note = Description of Artificial Sequence: Synthetic oligonucleotide
  modified_base 1: mod_base = OTHER; note = 2'-fluorocytidine-3'-phosphate
  modified_base 2: mod_base = OTHER; note = 2'-O-methyladenosine-3'-phosphate
  modified_base 3: mod_base = OTHER; note = 2'-fluoroadenosine-3'-phosphate
  modified_base 4: mod_base = OTHER; note = 2'-O-methylguanosine-3'-phosphate
  modified_base 5: mod_base = OTHER; note = 2'-fluorocytidine-3'-phosphate
  modified_base 6: mod_base = OTHER; note = 2'-O-methyladenosine-3'-phosphate
  modified_base 7: mod_base = OTHER; note = 2'-fluoroguanosine-3'-phosphate
  modified_base 8: mod_base = OTHER; note = 2'-O-methyladenosine-3'-phosphate
  modified_base 9: mod_base = OTHER; note = 2'-fluorocytidine-3'-phosphate
  modified_base 10: mod_base = OTHER; note = 2'-fluoroadenosine-3'-phosphate
  modified_base 11: mod_base = OTHER; note = 2'-fluorouridine-3'-phosphate
  modified_base 12: mod_base = OTHER; note = 2'-O-methyluridine-3'-phosphate
  modified_base 13: mod_base = OTHER; note = 2'-fluorouridine-3'-phosphate
  modified_base 14: mod_base = OTHER; note = 2'-O-methyladenosine-3'-phosphate
  modified_base 15: mod_base = OTHER; note = 2'-fluorouridine-3'-phosphate
  modified_base 16: mod_base = OTHER; note = 2'-O-methylcytidine-3'-phosphate
  modified_base 17: mod_base = OTHER; note = 2'-fluorouridine-3'-phosphate
  modified_base 18: mod_base = OTHER; note = 2'-O-methyluridine-3'-phosphate
  modified_base 19: mod_base = OTHER; note = 2'-fluorouridine-3'-phosphate
  modified_base 20: mod_base = OTHER; note = 2'-O-methyluridine-3'-phosphate
  modified_base 21: mod_base = OTHER; note = 2'-fluorouridine-3'-phosphate N-[tris(GalNAc-alkyl)-amidodecanoyl)]-4-hydroxyprolinol Hyp-(GalNAc-alkyl)3
caagcagacatttatcttttt

SEQ ID NO: 24 - RNA, 23 nt, synthetic construct
  source 1..23: mol_type = other RNA; note = Description of Artificial Sequence: Synthetic oligonucleotide
  modified_base 1: mod_base = OTHER; note = 2'-O-methyladenosine-3'-phosphate
  modified_base 2: mod_base = OTHER; note = 2'-fluoroadenosine-3'-phosphate
  modified_base 3: mod_base = OTHER; note = 2'-O-methyladenosine-3'-phosphate
  modified_base 4: mod_base = OTHER; note = 2'-fluoroadenosine-3'-phosphate
  modified_base 5: mod_base = OTHER; note = 2'-O-methyladenosine-3'-phosphate
  modified_base 6: mod_base = OTHER; note = 2'-fluoroguanosine-3'-phosphate
  modified_base 7: mod_base = OTHER; note = 2'-O-methyladenosine-3'-phosphate
  modified_base 8: mod_base = OTHER; note = 2'-fluorouridine-3'-phosphate
  modified_base 9: mod_base = OTHER; note = 2'-O-methyladenosine-3'-phosphate
  modified_base 10: mod_base = OTHER; note = 2'-fluoroadenosine-3'-phosphate
  modified_base 11: mod_base = OTHER; note = 2'-O-methyladenosine-3'-phosphate
  modified_base 12: mod_base = OTHER; note = 2'-O-methyluridine-3'-phosphate
  modified_base 13: mod_base = OTHER; note = 2'-O-methylguanosine-3'-phosphate
  modified_base 14: mod_base = OTHER; note = 2'-fluorouridine-3'-phosphate
  modified_base 15: mod_base = OTHER; note = 2'-O-methylcytidine-3'-phosphate
  modified_base 16: mod_base = OTHER; note = 2'-fluorouridine-3'-phosphate
  modified_base 17: mod_base = OTHER; note = 2'-O-methylguanosine-3'-phosphate
  modified_base 18: mod_base = OTHER; note = 2'-fluorocytidine-3'-phosphate
  modified_base 19: mod_base = OTHER; note = 2'-O-methyluridine-3'-phosphate
  modified_base 20: mod_base = OTHER; note = 2'-fluorouridine-3'-phosphate
  modified_base 21: mod_base = OTHER; note = 2'-O-methylguanosine-3'-phosphorothioate
  modified_base 22: mod_base = OTHER; note = 2'-fluorocytidine-3'-phosphorothioate
  modified_base 23: mod_base = OTHER; note = 2'-O-methyluridine-3'-phosphate
aaaaagataaatgtctgcttgct

SEQ ID NO: 25 - RNA, 21 nt, synthetic construct
  source 1..21: mol_type = other RNA; note = Description of Artificial Sequence: Synthetic oligonucleotide
  modified_base 1: mod_base = OTHER; note = 2'-fluorocytidine-3'-phosphate
  modified_base 2: mod_base = OTHER; note = 2'-O-methyladenosine-3'-phosphate
  modified_base 3: mod_base = OTHER; note = 2'-fluoroadenosine-3'-phosphate
  modified_base 4: mod_base = OTHER; note = 2'-O-methylguanosine-3'-phosphate
  modified_base 5: mod_base = OTHER; note = 2'-fluorocytidine-3'-phosphate
  modified_base 6: mod_base = OTHER; note = 2'-O-methyladenosine-3'-phosphate
  modified_base 7: mod_base = OTHER; note = 2'-fluoroguanosine-3'-phosphate
  modified_base 8: mod_base = OTHER; note = 2'-O-methyladenosine-3'-phosphate
  modified_base 9: mod_base = OTHER; note = 2'-fluorocytidine-3'-phosphate
  modified_base 10: mod_base = OTHER; note = 2'-fluoroadenosine-3'-phosphate
  modified_base 11: mod_base = OTHER; note = 2'-fluorouridine-3'-phosphate
  modified_base 12: mod_base = OTHER; note = 2'-O-methyluridine-3'-phosphate
  modified_base 13: mod_base = OTHER; note = 2'-fluorouridine-3'-phosphate
  modified_base 14: mod_base = OTHER; note = 2'-O-methyladenosine-3'-phosphate
  modified_base 15: mod_base = OTHER; note = 2'-fluorouridine-3'-phosphate
  modified_base 16: mod_base = OTHER; note = 2'-O-methylcytidine-3'-phosphate
  modified_base 17: mod_base = OTHER; note = 2'-fluorouridine-3'-phosphate
  modified_base 18: mod_base = OTHER; note = 2'-O-methyluridine-3'-phosphate
  modified_base 19: mod_base = OTHER; note = 2'-fluorouridine-3'-phosphate
  modified_base 20: mod_base = OTHER; note = 2'-O-methyluridine-3'-phosphate
  modified_base 21: mod_base = OTHER; note = 2'-fluorouridine-3'-phosphate N-[tris(GalNAc-alkyl)-amidodecanoyl)]-4-hydroxyprolinol Hyp-(GalNAc-alkyl)3
caagcagacatttatcttttt

SEQ ID NO: 26 - RNA, 23 nt, synthetic construct
  source 1..23: mol_type = other RNA; note = Description of Artificial Sequence: Synthetic oligonucleotide
  modified_base 1: mod_base = OTHER; note = 2'-O-methyladenosine-3'-phosphate
  modified_base 2: mod_base = OTHER; note = 2'-fluoroadenosine-3'-phosphate
  modified_base 3: mod_base = OTHER; note = 2'-O-methyladenosine-3'-phosphate
  modified_base 4: mod_base = OTHER; note = 2'-fluoroadenosine-3'-phosphate
  modified_base 5: mod_base = OTHER; note = 2'-O-methyladenosine-3'-phosphate
  modified_base 6: mod_base = OTHER; note = 2'-fluoroguanosine-3'-phosphate
  modified_base 7: mod_base = OTHER; note = 2'-O-methyladenosine-3'-phosphate
  modified_base 8: mod_base = OTHER; note = 2'-fluorouridine-3'-phosphate
  modified_base 9: mod_base = OTHER; note = 2'-O-methyladenosine-3'-phosphate
  modified_base 10: mod_base = OTHER; note = 2'-fluoroadenosine-3'-phosphate
  modified_base 11: mod_base = OTHER; note = 2'-O-methyladenosine-3'-phosphate
  modified_base 12: mod_base = OTHER; note = 2'-O-methyluridine-3'-phosphate
  modified_base 13: mod_base = OTHER; note = 2'-O-methylguanosine-3'-phosphate
  modified_base 14: mod_base = OTHER; note = 2'-fluorouridine-3'-phosphate
  modified_base 15: mod_base = OTHER; note = 2'-O-methylcytidine-3'-phosphate
  modified_base 16: mod_base = OTHER; note = 2'-fluorouridine-3'-phosphate
  modified_base 17: mod_base = OTHER; note = 2'-O-methylguanosine-3'-phosphate
  modified_base 18: mod_base = OTHER; note = 2'-fluorocytidine-3'-phosphate
  modified_base 19: mod_base = OTHER; note = 2'-O-methyluridine-3'-phosphate
  modified_base 20: mod_base = OTHER; note = 2'-fluorouridine-3'-phosphate
  modified_base 21: mod_base = OTHER; note = 2'-O-methylguanosine-3'-phosphorothioate
  modified_base 22: mod_base = OTHER; note = 2'-fluorocytidine-3'-phosphorothioate
  modified_base 23: mod_base = OTHER; note = 2'-O-methyluridine-3'-phosphate
aaaaagataaatgtctgcttgct

SEQ ID NO: 27 - RNA, 21 nt, synthetic construct
  source 1..21: mol_type = other RNA; note = Description of Artificial Sequence: Synthetic oligonucleotide
  modified_base 1: mod_base = OTHER; note = 2'-O-methylcytidine-3'-phosphate
  modified_base 2: mod_base = OTHER; note = 2'-O-methyladenosine-3'-phosphate
  modified_base 3: mod_base = OTHER; note = 2'-fluoroadenosine-3'-phosphate
  modified_base 4: mod_base = OTHER; note = 2'-O-methylguanosine-3'-phosphate
  modified_base 5: mod_base = OTHER; note = 2'-fluorocytidine-3'-phosphate
  modified_base 6: mod_base = OTHER; note = 2'-O-methyladenosine-3'-phosphate
  modified_base 7: mod_base = OTHER; note = 2'-fluoroguanosine-3'-phosphate
  modified_base 8: mod_base = OTHER; note = 2'-O-methyladenosine-3'-phosphate
  modified_base 9: mod_base = OTHER; note = 2'-fluorocytidine-3'-phosphate
  modified_base 10: mod_base = OTHER; note = 2'-fluoroadenosine-3'-phosphate
  modified_base 11: mod_base = OTHER; note = 2'-fluorouridine-3'-phosphate
  modified_base 12: mod_base = OTHER; note = 2'-O-methyluridine-3'-phosphate
  modified_base 13: mod_base = OTHER; note = 2'-fluorouridine-3'-phosphate
  modified_base 14: mod_base = OTHER; note = 2'-O-methyladenosine-3'-phosphate
  modified_base 15: mod_base = OTHER; note = 2'-fluorouridine-3'-phosphate
  modified_base 16: mod_base = OTHER; note = 2'-O-methylcytidine-3'-phosphate
  modified_base 17: mod_base = OTHER; note = 2'-fluorouridine-3'-phosphate
  modified_base 18: mod_base = OTHER; note = 2'-O-methyluridine-3'-phosphate
  modified_base 19: mod_base = OTHER; note = 2'-fluorouridine-3'-phosphate
  modified_base 20: mod_base = OTHER; note = 2'-O-methyluridine-3'-phosphate
  modified_base 21: mod_base = OTHER; note = 2'-fluorouridine-3'-phosphate N-[tris(GalNAc-alkyl)-amidodecanoyl)]-4-hydroxyprolinol Hyp-(GalNAc-alkyl)3
caagcagacatttatcttttt

SEQ ID NO: 28 - RNA, 23 nt, synthetic construct
  source 1..23: mol_type = other RNA; note = Description of Artificial Sequence: Synthetic oligonucleotide
  modified_base 1: mod_base = OTHER; note = 2'-O-methyladenosine-3'-phosphate
  modified_base 2: mod_base = OTHER; note = 2'-fluoroadenosine-3'-phosphate
  modified_base 3: mod_base = OTHER; note = 2'-O-methyladenosine-3'-phosphate
  modified_base 4: mod_base = OTHER; note = 2'-fluoroadenosine-3'-phosphate
  modified_base 5: mod_base = OTHER; note = 2'-O-methyladenosine-3'-phosphate
  modified_base 6: mod_base = OTHER; note = 2'-fluoroguanosine-3'-phosphate
  modified_base 7: mod_base = OTHER; note = 2'-O-methyladenosine-3'-phosphate
  modified_base 8: mod_base = OTHER; note = 2'-fluorouridine-3'-phosphate
  modified_base 9: mod_base = OTHER; note = 2'-O-methyladenosine-3'-phosphate
  modified_base 10: mod_base = OTHER; note = 2'-fluoroadenosine-3'-phosphate
  modified_base 11: mod_base = OTHER; note = 2'-O-methyladenosine-3'-phosphate
  modified_base 12: mod_base = OTHER; note = 2'-O-methyluridine-3'-phosphate
  modified_base 13: mod_base = OTHER; note = 2'-O-methylguanosine-3'-phosphate
  modified_base 14: mod_base = OTHER; note = 2'-fluorouridine-3'-phosphate
  modified_base 15: mod_base = OTHER; note = 2'-O-methylcytidine-3'-phosphate
  modified_base 16: mod_base = OTHER; note = 2'-fluorouridine-3'-phosphate
  modified_base 17: mod_base = OTHER; note = 2'-O-methylguanosine-3'-phosphate
  modified_base 18: mod_base = OTHER; note = 2'-fluorocytidine-3'-phosphate
  modified_base 19: mod_base = OTHER; note = 2'-O-methyluridine-3'-phosphate
  modified_base 20: mod_base = OTHER; note = 2'-fluorouridine-3'-phosphate
  modified_base 21: mod_base = OTHER; note = 2'-O-methylguanosine-3'-phosphorothioate
  modified_base 22: mod_base = OTHER; note = 2'-fluorocytidine-3'-phosphorothioate
  modified_base 23: mod_base = OTHER; note = 2'-O-methyluridine-3'-phosphate
aaaaagataaatgtctgcttgct

SEQ ID NO: 29 - RNA, 21 nt, synthetic construct
  source 1..21: mol_type = other RNA; note = Description of Artificial Sequence: Synthetic oligonucleotide
  modified_base 1: mod_base = OTHER; note = 2'-O-methylcytidine-3'-phosphate
  modified_base 2: mod_base = OTHER; note = 2'-O-methyladenosine-3'-phosphate
  modified_base 3: mod_base = OTHER; note = 2'-fluoroadenosine-3'-phosphate
  modified_base 4: mod_base = OTHER; note = 2'-O-methylguanosine-3'-phosphate
  modified_base 5: mod_base = OTHER; note = 2'-fluorocytidine-3'-phosphate
  modified_base 6: mod_base = OTHER; note = 2'-O-methyladenosine-3'-phosphate
  modified_base 7: mod_base = OTHER; note = 2'-fluoroguanosine-3'-phosphate
  modified_base 8: mod_base = OTHER; note = 2'-O-methyladenosine-3'-phosphate
  modified_base 9: mod_base = OTHER; note = 2'-fluorocytidine-3'-phosphate
  modified_base 10: mod_base = OTHER; note = 2'-fluoroadenosine-3'-phosphate
  modified_base 11: mod_base = OTHER; note = 2'-fluorouridine-3'-phosphate
  modified_base 12: mod_base = OTHER; note = 2'-O-methyluridine-3'-phosphate
  modified_base 13: mod_base = OTHER; note = 2'-fluorouridine-3'-phosphate
  modified_base 14: mod_base = OTHER; note = 2'-O-methyladenosine-3'-phosphate
  modified_base 15: mod_base = OTHER; note = 2'-fluorouridine-3'-phosphate
  modified_base 16: mod_base = OTHER; note = 2'-O-methylcytidine-3'-phosphate
  modified_base 17: mod_base = OTHER; note = 2'-fluorouridine-3'-phosphate
  modified_base 18: mod_base = OTHER; note = 2'-O-methyluridine-3'-phosphate
  modified_base 19: mod_base = OTHER; note = 2'-fluorouridine-3'-phosphate
  modified_base 20: mod_base = OTHER; note = 2'-O-methyluridine-3'-phosphate
  modified_base 21: mod_base = OTHER; note = 2'-fluorouridine-3'-phosphate N-[tris(GalNAc-alkyl)-amidodecanoyl)]-4-hydroxyprolinol Hyp-(GalNAc-alkyl)3
caagcagacatttatcttttt

SEQ ID NO: 30 - RNA, 23 nt, synthetic construct
  source 1..23: mol_type = other RNA; note = Description of Artificial Sequence: Synthetic oligonucleotide
  modified_base 1: mod_base = OTHER; note = 2'-O-methyladenosine-3'-phosphate
  modified_base 2: mod_base = OTHER; note = 2'-fluoroadenosine-3'-phosphate
  modified_base 3: mod_base = OTHER; note = 2'-O-methyladenosine-3'-phosphate
  modified_base 4: mod_base = OTHER; note = 2'-fluoroadenosine-3'-phosphate
  modified_base 5: mod_base = OTHER; note = 2'-O-methyladenosine-3'-phosphate
  modified_base 6: mod_base = OTHER; note = 2'-fluoroguanosine-3'-phosphate
  modified_base 7: mod_base = OTHER; note = 2'-O-methyladenosine-3'-phosphate
  modified_base 8: mod_base = OTHER; note = 2'-fluorouridine-3'-phosphate
  modified_base 9: mod_base = OTHER; note = 2'-O-methyladenosine-3'-phosphate
  modified_base 10: mod_base = OTHER; note = 2'-fluoroadenosine-3'-phosphate
  modified_base 11: mod_base = OTHER; note = 2'-O-methyladenosine-3'-phosphate
  modified_base 12: mod_base = OTHER; note = 2'-O-methyluridine-3'-phosphate
  modified_base 13: mod_base = OTHER; note = 2'-O-methylguanosine-3'-phosphate
  modified_base 14: mod_base = OTHER; note = 2'-fluorouridine-3'-phosphate
  modified_base 15: mod_base = OTHER; note = 2'-O-methylcytidine-3'-phosphate
  modified_base 16: mod_base = OTHER; note = 2'-fluorouridine-3'-phosphate
  modified_base 17: mod_base = OTHER; note = 2'-O-methylguanosine-3'-phosphate
  modified_base 18: mod_base = OTHER; note = 2'-fluorocytidine-3'-phosphate
  modified_base 19: mod_base = OTHER; note = 2'-O-methyluridine-3'-phosphate
  modified_base 20: mod_base = OTHER; note = 2'-fluorouridine-3'-phosphate
  modified_base 21: mod_base = OTHER; note = 2'-O-methylguanosine-3'-phosphorothioate
  modified_base 22: mod_base = OTHER; note = 2'-fluorocytidine-3'-phosphorothioate
  modified_base 23: mod_base = OTHER; note = 2'-O-methyluridine-3'-phosphate
aaaaagataaatgtctgcttgct

SEQ ID NO: 31 - RNA, 21 nt, synthetic construct
  source 1..21: mol_type = other RNA; note = Description of Artificial Sequence: Synthetic oligonucleotide
  modified_base 1: mod_base = OTHER; note = inverted cytidine-5'-phosphate
  modified_base 2: mod_base = OTHER; note = 2'-O-methyladenosine-3'-phosphate
  modified_base 3: mod_base = OTHER; note = 2'-fluoroadenosine-3'-phosphate
  modified_base 4: mod_base = OTHER; note = 2'-O-methylguanosine-3'-phosphate
  modified_base 5: mod_base = OTHER; note = 2'-fluorocytidine-3'-phosphate
  modified_base 6: mod_base = OTHER; note = 2'-O-methyladenosine-3'-phosphate
  modified_base 7: mod_base = OTHER; note = 2'-fluoroguanosine-3'-phosphate
  modified_base 8: mod_base = OTHER; note = 2'-O-methyladenosine-3'-phosphate
  modified_base 9: mod_base = OTHER; note = 2'-fluorocytidine-3'-phosphate
  modified_base 10: mod_base = OTHER; note = 2'-fluoroadenosine-3'-phosphate
  modified_base 11: mod_base = OTHER; note = 2'-fluorouridine-3'-phosphate
  modified_base 12: mod_base = OTHER; note = 2'-O-methyluridine-3'-phosphate
  modified_base 13: mod_base = OTHER; note = 2'-fluorouridine-3'-phosphate
  modified_base 14: mod_base = OTHER; note = 2'-O-methyladenosine-3'-phosphate
  modified_base 15: mod_base = OTHER; note = 2'-fluorouridine-3'-phosphate
  modified_base 16: mod_base = OTHER; note = 2'-O-methylcytidine-3'-phosphate
  modified_base 17: mod_base = OTHER; note = 2'-fluorouridine-3'-phosphate
  modified_base 18: mod_base = OTHER; note = 2'-O-methyluridine-3'-phosphate
  modified_base 19: mod_base = OTHER; note = 2'-fluorouridine-3'-phosphate
  modified_base 20: mod_base = OTHER; note = 2'-O-methyluridine-3'-phosphate
  modified_base 21: mod_base = OTHER; note = 2'-fluorouridine-3'-phosphate N-[tris(GalNAc-alkyl)-amidodecanoyl)]-4-hydroxyprolinol Hyp-(GalNAc-alkyl)3
caagcagacatttatcttttt

SEQ ID NO: 32 - RNA, 23 nt, synthetic construct
  source 1..23: mol_type = other RNA; note = Description of Artificial Sequence: Synthetic oligonucleotide
  modified_base 1: mod_base = OTHER; note = 2'-O-methyladenosine-3'-phosphate
  modified_base 2: mod_base = OTHER; note = 2'-fluoroadenosine-3'-phosphate
  modified_base 3: mod_base = OTHER; note = 2'-O-methyladenosine-3'-phosphate
  modified_base 4: mod_base = OTHER; note = 2'-fluoroadenosine-3'-phosphate
  modified_base 5: mod_base = OTHER; note = 2'-O-methyladenosine-3'-phosphate
  modified_base 6: mod_base = OTHER; note = 2'-fluoroguanosine-3'-phosphate
  modified_base 7: mod_base = OTHER; note = 2'-O-methyladenosine-3'-phosphate
  modified_base 8: mod_base = OTHER; note = 2'-fluorouridine-3'-phosphate
  modified_base 9: mod_base = OTHER; note = 2'-O-methyladenosine-3'-phosphate
  modified_base 10: mod_base = OTHER; note = 2'-fluoroadenosine-3'-phosphate
  modified_base 11: mod_base = OTHER; note = 2'-O-methyladenosine-3'-phosphate
  modified_base 12: mod_base = OTHER; note = 2'-O-methyluridine-3'-phosphate
  modified_base 13: mod_base = OTHER; note = 2'-O-methylguanosine-3'-phosphate
  modified_base 14: mod_base = OTHER; note = 2'-fluorouridine-3'-phosphate
  modified_base 15: mod_base = OTHER; note = 2'-O-methylcytidine-3'-phosphate
  modified_base 16: mod_base = OTHER; note = 2'-fluorouridine-3'-phosphate
  modified_base 17: mod_base = OTHER; note = 2'-O-methylguanosine-3'-phosphate
  modified_base 18: mod_base = OTHER; note = 2'-fluorocytidine-3'-phosphate
  modified_base 19: mod_base = OTHER; note = 2'-O-methyluridine-3'-phosphate
  modified_base 20: mod_base = OTHER; note = 2'-fluorouridine-3'-phosphate
  modified_base 21: mod_base = OTHER; note = 2'-O-methylguanosine-3'-phosphorothioate
  modified_base 22: mod_base = OTHER; note = 2'-fluorocytidine-3'-phosphorothioate
  modified_base 23: mod_base = OTHER; note = 2'-O-methyluridine-3'-phosphate
aaaaagataaatgtctgcttgct

SEQ ID NO: 33 - RNA, 21 nt, synthetic construct
  source 1..21: mol_type = other RNA; note = Description of Artificial Sequence: Synthetic oligonucleotide
  modified_base 1: mod_base = OTHER; note = inverted cytidine-5'-phosphate
  modified_base 2: mod_base = OTHER; note = 2'-O-methyladenosine-3'-phosphate
  modified_base 3: mod_base = OTHER; note = 2'-fluoroadenosine-3'-phosphate
  modified_base 4: mod_base = OTHER; note = 2'-O-methylguanosine-3'-phosphate
  modified_base 5: mod_base = OTHER; note = 2'-fluorocytidine-3'-phosphate
  modified_base 6: mod_base = OTHER; note = 2'-O-methyladenosine-3'-phosphate
  modified_base 7: mod_base = OTHER; note = 2'-fluoroguanosine-3'-phosphate
  modified_base 8: mod_base = OTHER; note = 2'-O-methyladenosine-3'-phosphate
  modified_base 9: mod_base = OTHER; note = 2'-fluorocytidine-3'-phosphate
  modified_base 10: mod_base = OTHER; note = 2'-fluoroadenosine-3'-phosphate
  modified_base 11: mod_base = OTHER; note = 2'-fluorouridine-3'-phosphate
  modified_base 12: mod_base = OTHER; note = 2'-O-methyluridine-3'-phosphate
  modified_base 13: mod_base = OTHER; note = 2'-fluorouridine-3'-phosphate
  modified_base 14: mod_base = OTHER; note = 2'-O-methyladenosine-3'-phosphate
  modified_base 15: mod_base = OTHER; note = 2'-fluorouridine-3'-phosphate
  modified_base 16: mod_base = OTHER; note = 2'-O-methylcytidine-3'-phosphate
  modified_base 17: mod_base = OTHER; note = 2'-fluorouridine-3'-phosphate
  modified_base 18: mod_base = OTHER; note = 2'-O-methyluridine-3'-phosphate
  modified_base 19: mod_base = OTHER; note = 2'-fluorouridine-3'-phosphate
  modified_base 20: mod_base = OTHER; note = 2'-O-methyluridine-3'-phosphate
  modified_base 21: mod_base = OTHER; note = 2'-fluorouridine-3'-phosphate N-[tris(GalNAc-alkyl)-amidodecanoyl)]-4-hydroxyprolinol Hyp-(GalNAc-alkyl)3
caagcagacatttatcttttt

SEQ ID NO: 34 - RNA, 23 nt, synthetic construct
  source 1..23: mol_type = other RNA; note = Description of Artificial Sequence: Synthetic oligonucleotide
  modified_base 1: mod_base = OTHER; note = 2'-O-methyladenosine-3'-phosphate
  modified_base 2: mod_base = OTHER; note = 2'-fluoroadenosine-3'-phosphate
  modified_base 3: mod_base = OTHER; note = 2'-O-methyladenosine-3'-phosphate
  modified_base 4: mod_base = OTHER; note = 2'-fluoroadenosine-3'-phosphate
  modified_base 5: mod_base = OTHER; note = 2'-O-methyladenosine-3'-phosphate
  modified_base 6: mod_base = OTHER; note = 2'-fluoroguanosine-3'-phosphate
  modified_base 7: mod_base = OTHER; note = 2'-O-methyladenosine-3'-phosphate
  modified_base 8: mod_base = OTHER; note = 2'-fluorouridine-3'-phosphate
  modified_base 9: mod_base = OTHER; note = 2'-O-methyladenosine-3'-phosphate
  modified_base 10: mod_base = OTHER; note = 2'-fluoroadenosine-3'-phosphate
  modified_base 11: mod_base = OTHER; note = 2'-O-methyladenosine-3'-phosphate
  modified_base 12: mod_base = OTHER; note = 2'-O-methyluridine-3'-phosphate
  modified_base 13: mod_base = OTHER; note = 2'-O-methylguanosine-3'-phosphate
  modified_base 14: mod_base = OTHER; note = 2'-fluorouridine-3'-phosphate
  modified_base 15: mod_base = OTHER; note = 2'-O-methylcytidine-3'-phosphate
  modified_base 16: mod_base = OTHER; note = 2'-fluorouridine-3'-phosphate
  modified_base 17: mod_base = OTHER; note = 2'-O-methylguanosine-3'-phosphate
  modified_base 18: mod_base = OTHER; note = 2'-fluorocytidine-3'-phosphate
  modified_base 19: mod_base = OTHER; note = 2'-O-methyluridine-3'-phosphate
  modified_base 20: mod_base = OTHER; note = 2'-fluorouridine-3'-phosphate
  modified_base 21: mod_base = OTHER; note = 2'-O-methylguanosine-3'-phosphorothioate
  modified_base 22: mod_base = OTHER; note = 2'-fluorocytidine-3'-phosphorothioate
  modified_base 23: mod_base = OTHER; note = 2'-O-methyluridine-3'-phosphate
aaaaagataaatgtctgcttgct

SEQ ID NO: 35 - RNA, 21 nt, synthetic construct
  source 1..21: mol_type = other RNA; note = Description of Artificial Sequence: Synthetic oligonucleotide
  modified_base 1: mod_base = OTHER; note = inverted cytidine-5'-phosphate
  modified_base 2: mod_base = OTHER; note = 2'-O-methyladenosine-3'-phosphate
  modified_base 3: mod_base = OTHER; note = 2'-fluoroadenosine-3'-phosphate
  modified_base 4: mod_base = OTHER; note = 2'-O-methylguanosine-3'-phosphate
  modified_base 5: mod_base = OTHER; note = 2'-fluorocytidine-3'-phosphate
  modified_base 6: mod_base = OTHER; note = 2'-O-methyladenosine-3'-phosphate
  modified_base 7: mod_base = OTHER; note = 2'-fluoroguanosine-3'-phosphate
  modified_base 8: mod_base = OTHER; note = 2'-O-methyladenosine-3'-phosphate
  modified_base 9: mod_base = OTHER; note = 2'-fluorocytidine-3'-phosphate
  modified_base 10: mod_base = OTHER; note = 2'-fluoroadenosine-3'-phosphate
  modified_base 11: mod_base = OTHER; note = 2'-fluorouridine-3'-phosphate
  modified_base 12: mod_base = OTHER; note = 2'-O-methyluridine-3'-phosphate
  modified_base 13: mod_base = OTHER; note = 2'-fluorouridine-3'-phosphate
  modified_base 14: mod_base = OTHER; note = 2'-O-methyladenosine-3'-phosphate
  modified_base 15: mod_base = OTHER; note = 2'-fluorouridine-3'-phosphate
  modified_base 16: mod_base = OTHER; note = 2'-O-methylcytidine-3'-phosphate
  modified_base 17: mod_base = OTHER; note = 2'-fluorouridine-3'-phosphate
  modified_base 18: mod_base = OTHER; note = 2'-O-methyluridine-3'-phosphate
  modified_base 19: mod_base = OTHER; note = 2'-fluorouridine-3'-phosphate
  modified_base 20: mod_base = OTHER; note = 2'-O-methyluridine-3'-phosphate
  modified_base 21: mod_base = OTHER; note = 2'-fluorouridine-3'-phosphate N-[tris(GalNAc-alkyl)-amidodecanoyl)]-4-hydroxyprolinol Hyp-(GalNAc-alkyl)3
caagcagacatttatcttttt

SEQ ID NO: 36 - RNA, 23 nt, synthetic construct
  source 1..23: mol_type = other RNA; note = Description of Artificial Sequence: Synthetic oligonucleotide
  modified_base 1: mod_base = OTHER; note = 2'-O-methyladenosine-3'-phosphate
  modified_base 2: mod_base = OTHER; note = 2'-fluoroadenosine-3'-phosphate
  modified_base 3: mod_base = OTHER; note = 2'-O-methyladenosine-3'-phosphate
  modified_base 4: mod_base = OTHER; note = 2'-fluoroadenosine-3'-phosphate
  modified_base 5: mod_base = OTHER; note = 2'-O-methyladenosine-3'-phosphate
  modified_base 6: mod_base = OTHER; note = 2'-fluoroguanosine-3'-phosphate
  modified_base 7: mod_base = OTHER; note = 2'-O-methyladenosine-3'-phosphate
  modified_base 8: mod_base = OTHER; note = 2'-fluorouridine-3'-phosphate
  modified_base 9: mod_base = OTHER; note = 2'-O-methyladenosine-3'-phosphate
  modified_base 10: mod_base = OTHER; note = 2'-fluoroadenosine-3'-phosphate
  modified_base 11: mod_base = OTHER; note = 2'-O-methyladenosine-3'-phosphate
  modified_base 12: mod_base = OTHER; note = 2'-O-methyluridine-3'-phosphate
  modified_base 13: mod_base = OTHER; note = 2'-O-methylguanosine-3'-phosphate
  modified_base 14: mod_base = OTHER; note = 2'-fluorouridine-3'-phosphate
  modified_base 15: mod_base = OTHER; note = 2'-O-methylcytidine-3'-phosphate
  modified_base 16: mod_base = OTHER; note = 2'-fluorouridine-3'-phosphate
  modified_base 17: mod_base = OTHER; note = 2'-O-methylguanosine-3'-phosphate
  modified_base 18: mod_base = OTHER; note = 2'-fluorocytidine-3'-phosphate
  modified_base 19: mod_base = OTHER; note = 2'-O-methyluridine-3'-phosphate
  modified_base 20: mod_base = OTHER; note = 2'-fluorouridine-3'-phosphate
  modified_base 21: mod_base = OTHER; note = 2'-O-methylguanosine-3'-phosphorothioate
  modified_base 22: mod_base = OTHER; note = 2'-fluorocytidine-3'-phosphorothioate
  modified_base 23: mod_base = OTHER; note = 2'-O-methyluridine-3'-phosphate
aaaaagataaatgtctgcttgct

SEQ ID NO: 37 - RNA, 21 nt, synthetic construct
  source 1..21: mol_type = other RNA; note = Description of Artificial Sequence: Synthetic oligonucleotide
  modified_base 1: mod_base = OTHER; note = inverted cytidine-5'-phosphate
  modified_base 2: mod_base = OTHER; note = 2'-O-methyladenosine-3'-phosphate
  modified_base 3: mod_base = OTHER; note = 2'-fluoroadenosine-3'-phosphate
  modified_base 4: mod_base = OTHER; note = 2'-O-methylguanosine-3'-phosphate
  modified_base 5: mod_base = OTHER; note = 2'-fluorocytidine-3'-phosphate
  modified_base 6: mod_base = OTHER; note = 2'-O-methyladenosine-3'-phosphate
  modified_base 7: mod_base = OTHER; note = 2'-fluoroguanosine-3'-phosphate
  modified_base 8: mod_base = OTHER; note = 2'-O-methyladenosine-3'-phosphate
  modified_base 9: mod_base = OTHER; note = 2'-fluorocytidine-3'-phosphate
  modified_base 10: mod_base = OTHER; note = 2'-fluoroadenosine-3'-phosphate
  modified_base 11: mod_base = OTHER; note = 2'-fluorouridine-3'-phosphate
  modified_base 12: mod_base = OTHER; note = 2'-O-methyluridine-3'-phosphate
  modified_base 13: mod_base = OTHER; note = 2'-fluorouridine-3'-phosphate
  modified_base 14: mod_base = OTHER; note = 2'-O-methyladenosine-3'-phosphate
  modified_base 15: mod_base = OTHER; note = 2'-fluorouridine-3'-phosphate
  modified_base 16: mod_base = OTHER; note = 2'-O-methylcytidine-3'-phosphate
  modified_base 17: mod_base = OTHER; note = 2'-fluorouridine-3'-phosphate
  modified_base 18: mod_base = OTHER; note = 2'-O-methyluridine-3'-phosphate
  modified_base 19: mod_base = OTHER; note = 2'-fluorouridine-3'-phosphate
  modified_base 20: mod_base = OTHER; note = 2'-O-methyluridine-3'-phosphate
  modified_base 21: mod_base = OTHER; note = 2'-fluorouridine-3'-phosphate N-[tris(GalNAc-alkyl)-amidodecanoyl)]-4-hydroxyprolinol Hyp-(GalNAc-alkyl)3
caagcagacatttatcttttt

SEQ ID NO: 38 - RNA, 23 nt, synthetic construct
  source 1..23: mol_type = other RNA; note = Description of Artificial Sequence: Synthetic oligonucleotide
  modified_base 1: mod_base = OTHER; note = 2'-O-methyladenosine-3'-phosphate
  modified_base 2: mod_base = OTHER; note = 2'-fluoroadenosine-3'-phosphate
  modified_base 3: mod_base = OTHER; note = 2'-O-methyladenosine-3'-phosphate
  modified_base 4: mod_base = OTHER; note = 2'-fluoroadenosine-3'-phosphate
  modified_base 5: mod_base = OTHER; note = 2'-O-methyladenosine-3'-phosphate
  modified_base 6: mod_base = OTHER; note = 2'-fluoroguanosine-3'-phosphate
  modified_base 7: mod_base = OTHER; note = 2'-O-methyladenosine-3'-phosphate
  modified_base 8: mod_base = OTHER; note = 2'-fluorouridine-3'-phosphate
  modified_base 9: mod_base = OTHER; note = 2'-O-methyladenosine-3'-phosphate
  modified_base 10: mod_base = OTHER; note = 2'-fluoroadenosine-3'-phosphate
  modified_base 11: mod_base = OTHER; note = 2'-O-methyladenosine-3'-phosphate
  modified_base 12: mod_base = OTHER; note = 2'-O-methyluridine-3'-phosphate
  modified_base 13: mod_base = OTHER; note = 2'-O-methylguanosine-3'-phosphate
  modified_base 14: mod_base = OTHER; note = 2'-fluorouridine-3'-phosphate
  modified_base 15: mod_base = OTHER; note = 2'-O-methylcytidine-3'-phosphate
  modified_base 16: mod_base = OTHER; note = 2'-fluorouridine-3'-phosphate
  modified_base 17: mod_base = OTHER; note = 2'-O-methylguanosine-3'-phosphate
  modified_base 18: mod_base = OTHER; note = 2'-fluorocytidine-3'-phosphate
  modified_base 19: mod_base = OTHER; note = 2'-O-methyluridine-3'-phosphate
  modified_base 20: mod_base = OTHER; note = 2'-fluorouridine-3'-phosphate
  modified_base 21: mod_base = OTHER; note = 2'-O-methylguanosine-3'-phosphorothioate
  modified_base 22: mod_base = OTHER; note = 2'-fluorocytidine-3'-phosphorothioate
  modified_base 23: mod_base = OTHER; note = 2'-O-methyluridine-3'-phosphate
aaaaagataaatgtctgcttgct

SEQ ID NO: 39 - RNA, 21 nt, synthetic construct
  source 1..21: mol_type = other RNA; note = Description of Artificial Sequence: Synthetic oligonucleotide
  modified_base 1: mod_base = OTHER; note = inverted cytidine-5'-phosphate
  modified_base 2: mod_base = OTHER; note = 2'-O-methyladenosine-3'-phosphate
  modified_base 3: mod_base = OTHER; note = 2'-fluoroadenosine-3'-phosphate
  modified_base 4: mod_base = OTHER; note = 2'-O-methylguanosine-3'-phosphate
  modified_base 5: mod_base = OTHER; note = 2'-fluorocytidine-3'-phosphate
  modified_base 6: mod_base = OTHER; note = 2'-O-methyladenosine-3'-phosphate
  modified_base 7: mod_base = OTHER; note = 2'-fluoroguanosine-3'-phosphate
  modified_base 8: mod_base = OTHER; note = 2'-O-methyladenosine-3'-phosphate
  modified_base 9: mod_base = OTHER; note = 2'-fluorocytidine-3'-phosphate
  modified_base 10: mod_base = OTHER; note = 2'-fluoroadenosine-3'-phosphate
  modified_base 11: mod_base = OTHER; note = 2'-fluorouridine-3'-phosphate
  modified_base 12: mod_base = OTHER; note = 2'-O-methyluridine-3'-phosphate
  modified_base 13: mod_base = OTHER; note = 2'-fluorouridine-3'-phosphate
  modified_base 14: mod_base = OTHER; note = 2'-O-methyladenosine-3'-phosphate
  modified_base 15: mod_base = OTHER; note = 2'-fluorouridine-3'-phosphate
  modified_base 16: mod_base = OTHER; note = 2'-O-methylcytidine-3'-phosphate
  modified_base 17: mod_base = OTHER; note = 2'-fluorouridine-3'-phosphate
  modified_base 18: mod_base = OTHER; note = 2'-O-methyluridine-3'-phosphate
  modified_base 19: mod_base = OTHER; note = 2'-fluorouridine-3'-phosphate
  modified_base 20: mod_base = OTHER; note = 2'-O-methyluridine-3'-phosphate
  modified_base 21: mod_base = OTHER; note = 2'-fluorouridine-3'-phosphate N-[tris(GalNAc-alkyl)-amidodecanoyl)]-4-hydroxyprolinol Hyp-(GalNAc-alkyl)3
caagcagacatttatcttttt

SEQ ID NO: 40 - RNA, 23 nt, synthetic construct
  source 1..23: mol_type = other RNA; note = Description of Artificial Sequence: Synthetic oligonucleotide
  modified_base 1: mod_base = OTHER; note = 2'-O-methyladenosine-3'-phosphate
  modified_base 2: mod_base = OTHER; note = 2'-fluoroadenosine-3'-phosphate
  modified_base 3: mod_base = OTHER; note = 2'-O-methyladenosine-3'-phosphate
  modified_base 4: mod_base = OTHER; note = 2'-fluoroadenosine-3'-phosphate
  modified_base 5: mod_base = OTHER; note = 2'-O-methyladenosine-3'-phosphate
  modified_base 6: mod_base = OTHER; note = 2'-fluoroguanosine-3'-phosphate
  modified_base 7: mod_base = OTHER; note = 2'-O-methyladenosine-3'-phosphate
  modified_base 8: mod_base = OTHER; note = 2'-fluorouridine-3'-phosphate
  modified_base 9: mod_base = OTHER; note = 2'-O-methyladenosine-3'-phosphate
  modified_base 10: mod_base = OTHER; note = 2'-fluoroadenosine-3'-phosphate
  modified_base 11: mod_base = OTHER; note = 2'-O-methyladenosine-3'-phosphate
  modified_base 12: mod_base = OTHER; note = 2'-O-methyluridine-3'-phosphate
  modified_base 13: mod_base = OTHER; note = 2'-O-methylguanosine-3'-phosphate
  modified_base 14: mod_base = OTHER; note = 2'-fluorouridine-3'-phosphate
  modified_base 15: mod_base = OTHER; note = 2'-O-methylcytidine-3'-phosphate
  modified_base 16: mod_base = OTHER; note = 2'-fluorouridine-3'-phosphate
  modified_base 17: mod_base = OTHER; note = 2'-O-methylguanosine-3'-phosphate
  modified_base 18: mod_base = OTHER; note = 2'-fluorocytidine-3'-phosphate
  modified_base 19: mod_base = OTHER; note = 2'-O-methyluridine-3'-phosphate
  modified_base 20: mod_base = OTHER; note = 2'-fluorouridine-3'-phosphate
  modified_base 21: mod_base = OTHER; note = 2'-O-methylguanosine-3'-phosphorothioate
  modified_base 22: mod_base = OTHER; note = 2'-fluorocytidine-3'-phosphorothioate
  modified_base 23: mod_base = OTHER; note = 2'-O-methyluridine-3'-phosphate
aaaaagataaatgtctgcttgct

SEQ ID NO: 41 - RNA, 21 nt, synthetic construct
  source 1..21: mol_type = other RNA; note = Description of Artificial Sequence: Synthetic oligonucleotide
  modified_base 1: mod_base = OTHER; note = beta-L-cytidine-3'-phosphate
  modified_base 2: mod_base = OTHER; note = 2'-O-methyladenosine-3'-phosphate
  modified_base 3: mod_base = OTHER; note = 2'-fluoroadenosine-3'-phosphate
  modified_base 4: mod_base = OTHER; note = 2'-O-methylguanosine-3'-phosphate
  modified_base 5: mod_base = OTHER; note = 2'-fluorocytidine-3'-phosphate
  modified_base 6: mod_base = OTHER; note = 2'-O-methyladenosine-3'-phosphate
  modified_base 7: mod_base = OTHER; note = 2'-fluoroguanosine-3'-phosphate
  modified_base 8: mod_base = OTHER; note = 2'-O-methyladenosine-3'-phosphate
  modified_base 9: mod_base = OTHER; note = 2'-fluorocytidine-3'-phosphate
  modified_base 10: mod_base = OTHER; note = 2'-fluoroadenosine-3'-phosphate
  modified_base 11: mod_base = OTHER; note = 2'-fluorouridine-3'-phosphate
  modified_base 12: mod_base = OTHER; note = 2'-O-methyluridine-3'-phosphate
  modified_base 13: mod_base = OTHER; note = 2'-fluorouridine-3'-phosphate
  modified_base 14: mod_base = OTHER; note = 2'-O-methyladenosine-3'-phosphate
  modified_base 15: mod_base = OTHER; note = 2'-fluorouridine-3'-phosphate
  modified_base 16: mod_base = OTHER; note = 2'-O-methylcytidine-3'-phosphate
  modified_base 17: mod_base = OTHER; note = 2'-fluorouridine-3'-phosphate
  modified_base 18: mod_base = OTHER; note = 2'-O-methyluridine-3'-phosphate
  modified_base 19: mod_base = OTHER; note = 2'-fluorouridine-3'-phosphate
  modified_base 20: mod_base = OTHER; note = 2'-O-methyluridine-3'-phosphate
  modified_base 21: mod_base = OTHER; note = 2'-fluorouridine-3'-phosphate N-[tris(GalNAc-alkyl)-amidodecanoyl)]-4-hydroxyprolinol Hyp-(GalNAc-alkyl)3
caagcagacatttatcttttt

SEQ ID NO: 42 - RNA, 23 nt, synthetic construct
  source 1..23: mol_type = other RNA; note = Description of Artificial Sequence: Synthetic oligonucleotide
  modified_base 1: mod_base = OTHER; note = 2'-O-methyladenosine-3'-phosphate
  modified_base 2: mod_base = OTHER; note = 2'-fluoroadenosine-3'-phosphate
  modified_base 3: mod_base = OTHER; note = 2'-O-methyladenosine-3'-phosphate
  modified_base 4: mod_base = OTHER; note = 2'-fluoroadenosine-3'-phosphate
  modified_base 5: mod_base = OTHER; note = 2'-O-methyladenosine-3'-phosphate
  modified_base 6: mod_base = OTHER; note = 2'-fluoroguanosine-3'-phosphate
  modified_base 7: mod_base = OTHER; note = 2'-O-methyladenosine-3'-phosphate
  modified_base 8: mod_base = OTHER; note = 2'-fluorouridine-3'-phosphate
  modified_base 9: mod_base = OTHER; note = 2'-O-methyladenosine-3'-phosphate
  modified_base 10: mod_base = OTHER; note = 2'-fluoroadenosine-3'-phosphate
  modified_base 11: mod_base = OTHER; note = 2'-O-methyladenosine-3'-phosphate
  modified_base 12: mod_base = OTHER; note = 2'-O-methyluridine-3'-phosphate
  modified_base 13: mod_base = OTHER; note = 2'-O-methylguanosine-3'-phosphate
  modified_base 14: mod_base = OTHER; note = 2'-fluorouridine-3'-phosphate
  modified_base 15: mod_base = OTHER; note = 2'-O-methylcytidine-3'-phosphate
  modified_base 16: mod_base = OTHER; note = 2'-fluorouridine-3'-phosphate
  modified_base 17: mod_base = OTHER; note = 2'-O-methylguanosine-3'-phosphate
  modified_base 18: mod_base = OTHER; note = 2'-fluorocytidine-3'-phosphate
  modified_base 19: mod_base = OTHER; note = 2'-O-methyluridine-3'-phosphate
  modified_base 20: mod_base = OTHER; note = 2'-fluorouridine-3'-phosphate
  modified_base 21: mod_base = OTHER; note = 2'-O-methylguanosine-3'-phosphorothioate
  modified_base 22: mod_base = OTHER; note = 2'-fluorocytidine-3'-phosphorothioate
  modified_base 23: mod_base = OTHER; note = 2'-O-methyluridine-3'-phosphate
aaaaagataaatgtctgcttgct

SEQ ID NO: 43 - RNA, 21 nt, synthetic construct
  source 1..21: mol_type = other RNA; note = Description of Artificial Sequence: Synthetic oligonucleotide
  modified_base 1: mod_base = OTHER; note = beta-L-cytidine-3'-phosphate
  modified_base 2: mod_base = OTHER; note = 2'-O-methyladenosine-3'-phosphate
  modified_base 3: mod_base = OTHER; note = 2'-fluoroadenosine-3'-phosphate
  modified_base 4: mod_base = OTHER; note = 2'-O-methylguanosine-3'-phosphate
  modified_base 5: mod_base = OTHER; note = 2'-fluorocytidine-3'-phosphate
  modified_base 6: mod_base = OTHER; note = 2'-O-methyladenosine-3'-phosphate
  modified_base 7: mod_base = OTHER; note = 2'-fluoroguanosine-3'-phosphate
  modified_base 8: mod_base = OTHER; note = 2'-O-methyladenosine-3'-phosphate
  modified_base 9: mod_base = OTHER; note = 2'-fluorocytidine-3'-phosphate
  modified_base 10: mod_base = OTHER; note = 2'-fluoroadenosine-3'-phosphate
  modified_base 11: mod_base = OTHER; note = 2'-fluorouridine-3'-phosphate
  modified_base 12: mod_base = OTHER; note = 2'-O-methyluridine-3'-phosphate
  modified_base 13: mod_base = OTHER; note = 2'-fluorouridine-3'-phosphate
  modified_base 14: mod_base = OTHER; note = 2'-O-methyladenosine-3'-phosphate
  modified_base 15: mod_base = OTHER; note = 2'-fluorouridine-3'-phosphate
  modified_base 16: mod_base = OTHER; note = 2'-O-methylcytidine-3'-phosphate
  modified_base 17: mod_base = OTHER; note = 2'-fluorouridine-3'-phosphate
  modified_base 18: mod_base = OTHER; note = 2'-O-methyluridine-3'-phosphate
  modified_base 19: mod_base = OTHER; note = 2'-fluorouridine-3'-phosphate
  modified_base 20: mod_base = OTHER; note = 2'-O-methyluridine-3'-phosphate
  modified_base 21: mod_base = OTHER; note = 2'-fluorouridine-3'-phosphate N-[tris(GalNAc-alkyl)-amidodecanoyl)]-4-hydroxyprolinol Hyp-(GalNAc-alkyl)3
caagcagacatttatcttttt

SEQ ID NO: 44 - RNA, 23 nt, synthetic construct
  source 1..23: mol_type = other RNA; note = Description of Artificial Sequence: Synthetic oligonucleotide
  modified_base 1: mod_base = OTHER; note = 2'-O-methyladenosine-3'-phosphate
  modified_base 2: mod_base = OTHER; note = 2'-fluoroadenosine-3'-phosphate
  modified_base 3: mod_base = OTHER; note = 2'-O-methyladenosine-3'-phosphate
  modified_base 4: mod_base = OTHER; note = 2'-fluoroadenosine-3'-phosphate
  modified_base 5: mod_base = OTHER; note = 2'-O-methyladenosine-3'-phosphate
  modified_base 6: mod_base = OTHER; note = 2'-fluoroguanosine-3'-phosphate
  modified_base 7: mod_base = OTHER; note = 2'-O-methyladenosine-3'-phosphate
  modified_base 8: mod_base = OTHER; note = 2'-fluorouridine-3'-phosphate
  modified_base 9: mod_base = OTHER; note = 2'-O-methyladenosine-3'-phosphate
  modified_base 10: mod_base = OTHER; note = 2'-fluoroadenosine-3'-phosphate
  modified_base 11: mod_base = OTHER; note = 2'-O-methyladenosine-3'-phosphate
  modified_base 12: mod_base = OTHER; note = 2'-O-methyluridine-3'-phosphate
  modified_base 13: mod_base = OTHER; note = 2'-O-methylguanosine-3'-phosphate
  modified_base 14: mod_base = OTHER; note = 2'-fluorouridine-3'-phosphate
  modified_base 15: mod_base = OTHER; note = 2'-O-methylcytidine-3'-phosphate
  modified_base 16: mod_base = OTHER; note = 2'-fluorouridine-3'-phosphate
  modified_base 17: mod_base = OTHER; note = 2'-O-methylguanosine-3'-phosphate
  modified_base 18: mod_base = OTHER; note = 2'-fluorocytidine-3'-phosphate
  modified_base 19: mod_base = OTHER; note = 2'-O-methyluridine-3'-phosphate
  modified_base 20: mod_base = OTHER; note = 2'-fluorouridine-3'-phosphate
  modified_base 21: mod_base = OTHER; note = 2'-O-methylguanosine-3'-phosphorothioate
  modified_base 22: mod_base = OTHER; note = 2'-fluorocytidine-3'-phosphorothioate
  modified_base 23: mod_base = OTHER; note = 2'-O-methyluridine-3'-phosphate
aaaaagataaatgtctgcttgct

SEQ ID NO: 45 - RNA, 21 nt, synthetic construct
  source 1..21: mol_type = other RNA; note = Description of Artificial Sequence: Synthetic oligonucleotide
  modified_base 1: mod_base = OTHER; note = beta-L-cytidine-3'-phosphate
  modified_base 2: mod_base = OTHER; note = 2'-O-methyladenosine-3'-phosphate
  modified_base 3: mod_base = OTHER; note = 2'-fluoroadenosine-3'-phosphate
  modified_base 4: mod_base = OTHER; note = 2'-O-methylguanosine-3'-phosphate
  modified_base 5: mod_base = OTHER; note = 2'-fluorocytidine-3'-phosphate
  modified_base 6: mod_base = OTHER; note = 2'-O-methyladenosine-3'-phosphate
  modified_base 7: mod_base = OTHER; note = 2'-fluoroguanosine-3'-phosphate
  modified_base 8: mod_base = OTHER; note = 2'-O-methyladenosine-3'-phosphate
  modified_base 9: mod_base = OTHER; note = 2'-fluorocytidine-3'-phosphate
  modified_base 10: mod_base = OTHER; note = 2'-fluoroadenosine-3'-phosphate
  modified_base 11: mod_base = OTHER; note = 2'-fluorouridine-3'-phosphate
  modified_base 12: mod_base = OTHER; note = 2'-O-methyluridine-3'-phosphate
  modified_base 13: mod_base = OTHER; note = 2'-fluorouridine-3'-phosphate
  modified_base 14: mod_base = OTHER; note = 2'-O-methyladenosine-3'-phosphate
  modified_base 15: mod_base = OTHER; note = 2'-fluorouridine-3'-phosphate
  modified_base 16: mod_base = OTHER; note = 2'-O-methylcytidine-3'-phosphate
  modified_base 17: mod_base = OTHER; note = 2'-fluorouridine-3'-phosphate
  modified_base 18: mod_base = OTHER; note = 2'-O-methyluridine-3'-phosphate
  modified_base 19: mod_base = OTHER; note = 2'-fluorouridine-3'-phosphate
  modified_base 20: mod_base = OTHER; note = 2'-O-methyluridine-3'-phosphate
  modified_base 21: mod_base = OTHER; note = 2'-fluorouridine-3'-phosphate N-[tris(GalNAc-alkyl)-amidodecanoyl)]-4-hydroxyprolinol Hyp-(GalNAc-alkyl)3
caagcagacatttatcttttt

SEQ ID NO: 46 - RNA, 23 nt, synthetic construct
  source 1..23: mol_type = other RNA; note = Description of Artificial Sequence: Synthetic oligonucleotide
  modified_base 1: mod_base = OTHER; note = 2'-O-methyladenosine-3'-phosphate
  modified_base 2: mod_base = OTHER; note = 2'-fluoroadenosine-3'-phosphate
  modified_base 3: mod_base = OTHER; note = 2'-O-methyladenosine-3'-phosphate
  modified_base 4: mod_base = OTHER; note = 2'-fluoroadenosine-3'-phosphate
  modified_base 5: mod_base = OTHER; note = 2'-O-methyladenosine-3'-phosphate
  modified_base 6: mod_base = OTHER; note = 2'-fluoroguanosine-3'-phosphate
  modified_base 7: mod_base = OTHER; note = 2'-O-methyladenosine-3'-phosphate
  modified_base 8: mod_base = OTHER; note = 2'-fluorouridine-3'-phosphate
  modified_base 9: mod_base = OTHER; note = 2'-O-methyladenosine-3'-phosphate
  modified_base 10: mod_base = OTHER; note = 2'-fluoroadenosine-3'-phosphate
  modified_base 11: mod_base = OTHER; note = 2'-O-methyladenosine-3'-phosphate
  modified_base 12: mod_base = OTHER; note = 2'-O-methyluridine-3'-phosphate
  modified_base 13: mod_base = OTHER; note = 2'-O-methylguanosine-3'-phosphate
  modified_base 14: mod_base = OTHER; note = 2'-fluorouridine-3'-phosphate
  modified_base 15: mod_base = OTHER; note = 2'-O-methylcytidine-3'-phosphate
  modified_base 16: mod_base = OTHER; note = 2'-fluorouridine-3'-phosphate
  modified_base 17: mod_base = OTHER; note = 2'-O-methylguanosine-3'-phosphate
  modified_base 18: mod_base = OTHER; note = 2'-fluorocytidine-3'-phosphate
  modified_base 19: mod_base = OTHER; note = 2'-O-methyluridine-3'-phosphate
  modified_base 20: mod_base = OTHER; note = 2'-fluorouridine-3'-phosphate
  modified_base 21: mod_base = OTHER; note = 2'-O-methylguanosine-3'-phosphorothioate
  modified_base 22: mod_base = OTHER; note = 2'-fluorocytidine-3'-phosphorothioate
  modified_base 23: mod_base = OTHER; note = 2'-O-methyluridine-3'-phosphate
aaaaagataaatgtctgcttgct

SEQ ID NO: 47 - RNA, 21 nt, synthetic construct
  source 1..21: mol_type = other RNA; note = Description of Artificial Sequence: Synthetic oligonucleotide
  modified_base 1: mod_base = OTHER; note = beta-L-cytidine-3'-phosphate
  modified_base 2: mod_base = OTHER; note = 2'-O-methyladenosine-3'-phosphate
  modified_base 3: mod_base = OTHER; note = 2'-fluoroadenosine-3'-phosphate
  modified_base 4: mod_base = OTHER; note = 2'-O-methylguanosine-3'-phosphate
  modified_base 5: mod_base = OTHER; note = 2'-fluorocytidine-3'-phosphate
  modified_base 6: mod_base = OTHER; note = 2'-O-methyladenosine-3'-phosphate
  modified_base 7: mod_base = OTHER; note = 2'-fluoroguanosine-3'-phosphate
  modified_base 8: mod_base = OTHER; note = 2'-O-methyladenosine-3'-phosphate
  modified_base 9: mod_base = OTHER; note = 2'-fluorocytidine-3'-phosphate
  modified_base 10: mod_base = OTHER; note = 2'-fluoroadenosine-3'-phosphate
  modified_base 11: mod_base = OTHER; note = 2'-fluorouridine-3'-phosphate
  modified_base 12: mod_base = OTHER; note = 2'-O-methyluridine-3'-phosphate
  modified_base 13: mod_base = OTHER; note = 2'-fluorouridine-3'-phosphate
  modified_base 14: mod_base = OTHER; note = 2'-O-methyladenosine-3'-phosphate
  modified_base 15: mod_base = OTHER; note = 2'-fluorouridine-3'-phosphate
  modified_base 16: mod_base = OTHER; note = 2'-O-methylcytidine-3'-phosphate
  modified_base 17: mod_base = OTHER; note = 2'-fluorouridine-3'-phosphate
  modified_base 18: mod_base = OTHER; note = 2'-O-methyluridine-3'-phosphate
  modified_base 19: mod_base = OTHER; note = 2'-fluorouridine-3'-phosphate
  modified_base 20: mod_base = OTHER; note = 2'-O-methyluridine-3'-phosphate
  modified_base 21: mod_base = OTHER; note = 2'-fluorouridine-3'-phosphate N-[tris(GalNAc-alkyl)-amidodecanoyl)]-4-hydroxyprolinol Hyp-(GalNAc-alkyl)3
caagcagacatttatcttttt

SEQ ID NO: 48 - RNA, 23 nt, synthetic construct
  source 1..23: mol_type = other RNA; note = Description of Artificial Sequence: Synthetic oligonucleotide
  modified_base 1: mod_base = OTHER; note = 2'-O-methyladenosine-3'-phosphate
  modified_base 2: mod_base = OTHER; note = 2'-fluoroadenosine-3'-phosphate
  modified_base 3: mod_base = OTHER; note = 2'-O-methyladenosine-3'-phosphate
  modified_base 4: mod_base = OTHER; note = 2'-fluoroadenosine-3'-phosphate
  modified_base 5: mod_base = OTHER; note = 2'-O-methyladenosine-3'-phosphate
  modified_base 6: mod_base = OTHER; note = 2'-fluoroguanosine-3'-phosphate
  modified_base 7: mod_base = OTHER; note = 2'-O-methyladenosine-3'-phosphate
  modified_base 8: mod_base = OTHER; note = 2'-fluorouridine-3'-phosphate
  modified_base 9: mod_base = OTHER; note = 2'-O-methyladenosine-3'-phosphate
  modified_base 10: mod_base = OTHER; note = 2'-fluoroadenosine-3'-phosphate
  modified_base 11: mod_base = OTHER; note = 2'-O-methyladenosine-3'-phosphate
  modified_base 12: mod_base = OTHER; note = 2'-O-methyluridine-3'-phosphate
  modified_base 13: mod_base = OTHER; note = 2'-O-methylguanosine-3'-phosphate
  modified_base 14: mod_base = OTHER; note = 2'-fluorouridine-3'-phosphate
  modified_base 15: mod_base = OTHER; note = 2'-O-methylcytidine-3'-phosphate
  modified_base 16: mod_base = OTHER; note = 2'-fluorouridine-3'-phosphate
  modified_base 17: mod_base = OTHER; note = 2'-O-methylguanosine-3'-phosphate
  modified_base 18: mod_base = OTHER; note = 2'-fluorocytidine-3'-phosphate
  modified_base 19: mod_base = OTHER; note = 2'-O-methyluridine-3'-phosphate
  modified_base 20: mod_base = OTHER; note = 2'-fluorouridine-3'-phosphate
  modified_base 21: mod_base = OTHER; note = 2'-O-methylguanosine-3'-phosphorothioate
  modified_base 22: mod_base = OTHER; note = 2'-fluorocytidine-3'-phosphorothioate
  modified_base 23: mod_base = OTHER; note = 2'-O-methyluridine-3'-phosphate
aaaaagataaatgtctgcttgct

SEQ ID NO: 49 - RNA, 21 nt, synthetic construct
  source 1..21: mol_type = other RNA; note = Description of Artificial Sequence: Synthetic oligonucleotide
  modified_base 1: mod_base = OTHER; note = beta-L-cytidine-3'-phosphate
  modified_base 2: mod_base = OTHER; note = 2'-O-methyladenosine-3'-phosphate
  modified_base 3: mod_base = OTHER; note = 2'-fluoroadenosine-3'-phosphate
  modified_base 4: mod_base = OTHER; note = 2'-O-methylguanosine-3'-phosphate
  modified_base 5: mod_base = OTHER; note = 2'-fluorocytidine-3'-phosphate
  modified_base 6: mod_base = OTHER; note = 2'-O-methyladenosine-3'-phosphate
  modified_base 7: mod_base = OTHER; note = 2'-fluoroguanosine-3'-phosphate
  modified_base 8: mod_base = OTHER; note = 2'-O-methyladenosine-3'-phosphate
  modified_base 9: mod_base = OTHER; note = 2'-fluorocytidine-3'-phosphate
  modified_base 10: mod_base = OTHER; note = 2'-fluoroadenosine-3'-phosphate
  modified_base 11: mod_base = OTHER; note = 2'-fluorouridine-3'-phosphate
  modified_base 12: mod_base = OTHER; note = 2'-O-methyluridine-3'-phosphate
  modified_base 13: mod_base = OTHER; note = 2'-fluorouridine-3'-phosphate
  modified_base 14: mod_base = OTHER; note = 2'-O-methyladenosine-3'-phosphate
  modified_base 15: mod_base = OTHER; note = 2'-fluorouridine-3'-phosphate
  modified_base 16: mod_base = OTHER; note = 2'-O-methylcytidine-3'-phosphate
  modified_base 17: mod_base = OTHER; note = 2'-fluorouridine-3'-phosphate
  modified_base 18: mod_base = OTHER; note = 2'-O-methyluridine-3'-phosphate
  modified_base 19: mod_base = OTHER; note = 2'-fluorouridine-3'-phosphate
  modified_base 20: mod_base = OTHER; note = 2'-O-methyluridine-3'-phosphate
  modified_base 21: mod_base = OTHER; note = 2'-fluorouridine-3'-phosphate N-[tris(GalNAc-alkyl)-amidodecanoyl)]-4-hydroxyprolinol Hyp-(GalNAc-alkyl)3
caagcagacatttatcttttt

SEQ ID NO: 50 - RNA, 23 nt, synthetic construct
  source 1..23: mol_type = other RNA; note = Description of Artificial Sequence: Synthetic oligonucleotide
  modified_base 1: mod_base = OTHER; note = 2'-O-methyladenosine-3'-phosphate
  modified_base 2: mod_base = OTHER; note = 2'-fluoroadenosine-3'-phosphate
  modified_base 3: mod_base = OTHER; note = 2'-O-methyladenosine-3'-phosphate
  modified_base 4: mod_base = OTHER; note = 2'-fluoroadenosine-3'-phosphate
  modified_base 5: mod_base = OTHER; note = 2'-O-methyladenosine-3'-phosphate
  modified_base 6: mod_base = OTHER; note = 2'-fluoroguanosine-3'-phosphate
  modified_base 7: mod_base = OTHER; note = 2'-O-methyladenosine-3'-phosphate
  modified_base 8: mod_base = OTHER; note = 2'-fluorouridine-3'-phosphate
  modified_base 9: mod_base = OTHER; note = 2'-O-methyladenosine-3'-phosphate
  modified_base 10: mod_base = OTHER; note = 2'-fluoroadenosine-3'-phosphate
  modified_base 11: mod_base = OTHER; note = 2'-O-methyladenosine-3'-phosphate
  modified_base 12: mod_base = OTHER; note = 2'-O-methyluridine-3'-phosphate
  modified_base 13: mod_base = OTHER; note = 2'-O-methylguanosine-3'-phosphate
  modified_base 14: mod_base = OTHER; note = 2'-fluorouridine-3'-phosphate
  modified_base 15: mod_base = OTHER; note = 2'-O-methylcytidine-3'-phosphate
  modified_base 16: mod_base = OTHER; note = 2'-fluorouridine-3'-phosphate
  modified_base 17: mod_base = OTHER; note = 2'-O-methylguanosine-3'-phosphate
  modified_base 18: mod_base = OTHER; note = 2'-fluorocytidine-3'-phosphate
  modified_base 19: mod_base = OTHER; note = 2'-O-methyluridine-3'-phosphate
  modified_base 20: mod_base = OTHER; note = 2'-fluorouridine-3'-phosphate
  modified_base 21: mod_base = OTHER; note = 2'-O-methylguanosine-3'-phosphorothioate
  modified_base 22: mod_base = OTHER; note = 2'-fluorocytidine-3'-phosphorothioate
  modified_base 23: mod_base = OTHER; note = 2'-O-methyluridine-3'-phosphate
aaaaagataaatgtctgcttgct

SEQ ID NO: 51 - RNA, 21 nt, synthetic construct
  source 1..21: mol_type = other RNA; note = Description of Artificial Sequence: Synthetic oligonucleotide
  modified_base 1: mod_base = OTHER; note = 2'-fluorocytidine-3'-phosphate
  modified_base 2: mod_base = OTHER; note = 2'-O-methyladenosine-3'-phosphate
  modified_base 3: mod_base = OTHER; note = 2'-O-methyladenosine-3'-phosphate
  modified_base 4: mod_base = OTHER; note = 2'-O-methylguanosine-3'-phosphate
  modified_base 5: mod_base = OTHER; note = 2'-fluorocytidine-3'-phosphate
  modified_base 6: mod_base = OTHER; note = 2'-O-methyladenosine-3'-phosphate
  modified_base 7: mod_base = OTHER; note = 2'-fluoroguanosine-3'-phosphate
  modified_base 8: mod_base = OTHER; note = 2'-O-methyladenosine-3'-phosphate
  modified_base 9: mod_base = OTHER; note = 2'-fluorocytidine-3'-phosphate
  modified_base 10: mod_base = OTHER; note = 2'-fluoroadenosine-3'-phosphate
  modified_base 11: mod_base = OTHER; note = 2'-fluorouridine-3'-phosphate
  modified_base 12: mod_base = OTHER; note = 2'-O-methyluridine-3'-phosphate
  modified_base 13: mod_base = OTHER; note = 2'-fluorouridine-3'-phosphate
  modified_base 14: mod_base = OTHER; note = 2'-O-methyladenosine-3'-phosphate
  modified_base 15: mod_base = OTHER; note = 2'-fluorouridine-3'-phosphate
  modified_base 16: mod_base = OTHER; note = 2'-O-methylcytidine-3'-phosphate
  modified_base 17: mod_base = OTHER; note = 2'-fluorouridine-3'-phosphate
  modified_base 18: mod_base = OTHER; note = 2'-O-methyluridine-3'-phosphate
  modified_base 19: mod_base = OTHER; note = 2'-fluorouridine-3'-phosphate
  modified_base 20: mod_base = OTHER; note = 2'-O-methyluridine-3'-phosphate
  modified_base 21: mod_base = OTHER; note = 2'-fluorouridine-3'-phosphate N-[tris(GalNAc-alkyl)-amidodecanoyl)]-4-hydroxyprolinol Hyp-(GalNAc-alkyl)3
caagcagacatttatcttttt

SEQ ID NO: 52 - RNA, 23 nt, synthetic construct
  source 1..23: mol_type = other RNA; note = Description of Artificial Sequence: Synthetic oligonucleotide
  modified_base 1: mod_base = OTHER; note = 2'-O-methyladenosine-3'-phosphate
  modified_base 2: mod_base = OTHER; note = 2'-fluoroadenosine-3'-phosphate
  modified_base 3: mod_base = OTHER; note = 2'-O-methyladenosine-3'-phosphate
  modified_base 4: mod_base = OTHER; note = 2'-fluoroadenosine-3'-phosphate
  modified_base 5: mod_base = OTHER; note = 2'-O-methyladenosine-3'-phosphate
  modified_base 6: mod_base = OTHER; note = 2'-fluoroguanosine-3'-phosphate
  modified_base 7: mod_base = OTHER; note = 2'-O-methyladenosine-3'-phosphate
  modified_base 8: mod_base = OTHER; note = 2'-fluorouridine-3'-phosphate
  modified_base 9: mod_base = OTHER; note = 2'-O-methyladenosine-3'-phosphate
  modified_base 10: mod_base = OTHER; note = 2'-fluoroadenosine-3'-phosphate
  modified_base 11: mod_base = OTHER; note = 2'-O-methyladenosine-3'-phosphate
  modified_base 12: mod_base = OTHER; note = 2'-O-methyluridine-3'-phosphate
  modified_base 13: mod_base = OTHER; note = 2'-O-methylguanosine-3'-phosphate
  modified_base 14: mod_base = OTHER; note = 2'-fluorouridine-3'-phosphate
  modified_base 15: mod_base = OTHER; note = 2'-O-methylcytidine-3'-phosphate
  modified_base 16: mod_base = OTHER; note = 2'-fluorouridine-3'-phosphate
  modified_base 17: mod_base = OTHER; note = 2'-O-methylguanosine-3'-phosphate
  modified_base 18: mod_base = OTHER; note = 2'-fluorocytidine-3'-phosphate
  modified_base 19: mod_base = OTHER; note = 2'-O-methyluridine-3'-phosphate
  modified_base 20: mod_base = OTHER; note = 2'-fluorouridine-3'-phosphate
  modified_base 21: mod_base = OTHER; note = 2'-O-methylguanosine-3'-phosphorothioate
  modified_base 22: mod_base = OTHER; note = 2'-fluorocytidine-3'-phosphorothioate
  modified_base 23: mod_base = OTHER; note = 2'-O-methyluridine-3'-phosphate
aaaaagataaatgtctgcttgct

SEQ ID NO: 53 - RNA, 21 nt, synthetic construct
  source 1..21: mol_type = other RNA; note = Description of Artificial Sequence: Synthetic oligonucleotide
  modified_base 1: mod_base = OTHER; note = 2'-fluorocytidine-3'-phosphate
  modified_base 2: mod_base = OTHER; note = 2'-O-methyladenosine-3'-phosphate
  modified_base 3: mod_base = OTHER; note = 2'-O-methyladenosine-3'-phosphate
  modified_base 4: mod_base = OTHER; note = 2'-O-methylguanosine-3'-phosphate
  modified_base 5: mod_base = OTHER; note = 2'-fluorocytidine-3'-phosphate
  modified_base 6: mod_base = OTHER; note = 2'-O-methyladenosine-3'-phosphate
  modified_base 7: mod_base = OTHER; note = 2'-fluoroguanosine-3'-phosphate
  modified_base 8: mod_base = OTHER; note = 2'-O-methyladenosine-3'-phosphate
  modified_base 9: mod_base = OTHER; note = 2'-fluorocytidine-3'-phosphate
  modified_base 10: mod_base = OTHER; note = 2'-fluoroadenosine-3'-phosphate
  modified_base 11: mod_base = OTHER; note = 2'-fluorouridine-3'-phosphate
  modified_base 12: mod_base = OTHER; note = 2'-O-methyluridine-3'-phosphate
  modified_base 13: mod_base = OTHER; note = 2'-fluorouridine-3'-phosphate
  modified_base 14: mod_base = OTHER; note = 2'-O-methyladenosine-3'-phosphate
  modified_base 15: mod_base = OTHER; note = 2'-fluorouridine-3'-phosphate
  modified_base 16: mod_base = OTHER; note = 2'-O-methylcytidine-3'-phosphate
  modified_base 17: mod_base = OTHER; note = 2'-fluorouridine-3'-phosphate
  modified_base 18: mod_base = OTHER; note = 2'-O-methyluridine-3'-phosphate
  modified_base 19: mod_base = OTHER; note = 2'-fluorouridine-3'-phosphate
  modified_base 20: mod_base = OTHER; note = 2'-O-methyluridine-3'-phosphate
  modified_base 21: mod_base = OTHER; note = 2'-fluorouridine-3'-phosphate N-[tris(GalNAc-alkyl)-amidodecanoyl)]-4-hydroxyprolinol Hyp-(GalNAc-alkyl)3
caagcagacatttatcttttt

SEQ ID NO: 54 - RNA, 23 nt, synthetic construct
  source 1..23: mol_type = other RNA; note = Description of Artificial Sequence: Synthetic oligonucleotide
  modified_base 1: mod_base = OTHER; note = 2'-O-methyladenosine-3'-phosphate
  modified_base 2: mod_base = OTHER; note = 2'-fluoroadenosine-3'-phosphate
  modified_base 3: mod_base = OTHER; note = 2'-O-methyladenosine-3'-phosphate
  modified_base 4: mod_base = OTHER; note = 2'-fluoroadenosine-3'-phosphate
  modified_base 5: mod_base = OTHER; note = 2'-O-methyladenosine-3'-phosphate
  modified_base 6: mod_base = OTHER; note = 2'-fluoroguanosine-3'-phosphate
  modified_base 7: mod_base = OTHER; note = 2'-O-methyladenosine-3'-phosphate
  modified_base 8: mod_base = OTHER; note = 2'-fluorouridine-3'-phosphate
  modified_base 9: mod_base = OTHER; note = 2'-O-methyladenosine-3'-phosphate
  modified_base 10: mod_base = OTHER; note = 2'-fluoroadenosine-3'-phosphate
  modified_base 11: mod_base = OTHER; note = 2'-O-methyladenosine-3'-phosphate
  modified_base 12: mod_base = OTHER; note = 2'-O-methyluridine-3'-phosphate
  modified_base 13: mod_base = OTHER; note = 2'-O-methylguanosine-3'-phosphate
  modified_base 14: mod_base = OTHER; note = 2'-fluorouridine-3'-phosphate
  modified_base 15: mod_base = OTHER; note = 2'-O-methylcytidine-3'-phosphate
  modified_base 16: mod_base = OTHER; note = 2'-fluorouridine-3'-phosphate
  modified_base 17: mod_base = OTHER; note = 2'-O-methylguanosine-3'-phosphate
  modified_base 18: mod_base = OTHER; note = 2'-fluorocytidine-3'-phosphate
  modified_base 19: mod_base = OTHER; note = 2'-O-methyluridine-3'-phosphate
  modified_base 20: mod_base = OTHER; note = 2'-fluorouridine-3'-phosphate
  modified_base 21: mod_base = OTHER; note = 2'-O-methylguanosine-3'-phosphorothioate
  modified_base 22: mod_base = OTHER; note = 2'-fluorocytidine-3'-phosphorothioate
  modified_base 23: mod_base = OTHER; note = 2'-O-methyluridine-3'-phosphate
aaaaagataaatgtctgcttgct

SEQ ID NO: 55 - RNA, 21 nt, synthetic construct
  source 1..21: mol_type = other RNA; note = Description of Artificial Sequence: Synthetic oligonucleotide
  modified_base 1: mod_base = OTHER; note = 2'-fluorocytidine-3'-phosphate
  modified_base 2: mod_base = OTHER; note = 2'-O-methyladenosine-3'-phosphate
  modified_base 3: mod_base = OTHER; note = 2'-O-methyladenosine-3'-phosphate
  modified_base 4: mod_base = OTHER; note = 2'-O-methylguanosine-3'-phosphate
  modified_base 5: mod_base = OTHER; note = 2'-fluorocytidine-3'-phosphate
  modified_base 6: mod_base = OTHER; note = 2'-O-methyladenosine-3'-phosphate
  modified_base 7: mod_base = OTHER; note = 2'-fluoroguanosine-3'-phosphate
  modified_base 8: mod_base = OTHER; note = 2'-O-methyladenosine-3'-phosphate
  modified_base 9: mod_base = OTHER; note = 2'-fluorocytidine-3'-phosphate
  modified_base 10: mod_base = OTHER; note = 2'-fluoroadenosine-3'-phosphate
  modified_base 11: mod_base = OTHER; note = 2'-fluorouridine-3'-phosphate
  modified_base 12: mod_base = OTHER; note = 2'-O-methyluridine-3'-phosphate
  modified_base 13: mod_base = OTHER; note = 2'-fluorouridine-3'-phosphate
  modified_base 14: mod_base = OTHER; note = 2'-O-methyladenosine-3'-phosphate
  modified_base 15: mod_base = OTHER; note = 2'-fluorouridine-3'-phosphate
  modified_base 16: mod_base = OTHER; note = 2'-O-methylcytidine-3'-phosphate
  modified_base 17: mod_base = OTHER; note = 2'-fluorouridine-3'-phosphate
  modified_base 18: mod_base = OTHER; note = 2'-O-methyluridine-3'-phosphate
  modified_base 19: mod_base = OTHER; note = 2'-fluorouridine-3'-phosphate
  modified_base 20: mod_base = OTHER; note = 2'-O-methyluridine-3'-phosphate
  modified_base 21: mod_base = OTHER; note = 2'-fluorouridine-3'-phosphate N-[tris(GalNAc-alkyl)-amidodecanoyl)]-4-hydroxyprolinol Hyp-(GalNAc-alkyl)3
caagcagacatttatcttttt

SEQ ID NO: 56 - RNA, 23 nt, synthetic construct
  source 1..23: mol_type = other RNA; note = Description of Artificial Sequence: Synthetic oligonucleotide
  modified_base 1: mod_base = OTHER; note = 2'-O-methyladenosine-3'-phosphate
  modified_base 2: mod_base = OTHER; note = 2'-fluoroadenosine-3'-phosphate
  modified_base 3: mod_base = OTHER; note = 2'-O-methyladenosine-3'-phosphate
  modified_base 4: mod_base = OTHER; note = 2'-fluoroadenosine-3'-phosphate
  modified_base 5: mod_base = OTHER; note = 2'-O-methyladenosine-3'-phosphate
  modified_base 6: mod_base = OTHER; note = 2'-fluoroguanosine-3'-phosphate
  modified_base 7: mod_base = OTHER; note = 2'-O-methyladenosine-3'-phosphate
  modified_base 8: mod_base = OTHER; note = 2'-fluorouridine-3'-phosphate
  modified_base 9: mod_base = OTHER; note = 2'-O-methyladenosine-3'-phosphate
  modified_base 10: mod_base = OTHER; note = 2'-fluoroadenosine-3'-phosphate
  modified_base 11: mod_base = OTHER; note = 2'-O-methyladenosine-3'-phosphate
  modified_base 12: mod_base = OTHER; note = 2'-O-methyluridine-3'-phosphate
  modified_base 13: mod_base = OTHER; note = 2'-O-methylguanosine-3'-phosphate
  modified_base 14: mod_base = OTHER; note = 2'-fluorouridine-3'-phosphate
  modified_base 15: mod_base = OTHER; note = 2'-O-methylcytidine-3'-phosphate
  modified_base 16: mod_base = OTHER; note = 2'-fluorouridine-3'-phosphate
  modified_base 17: mod_base = OTHER; note = 2'-O-methylguanosine-3'-phosphate
  modified_base 18: mod_base = OTHER; note = 2'-fluorocytidine-3'-phosphate
  modified_base 19: mod_base = OTHER; note = 2'-O-methyluridine-3'-phosphate
  modified_base 20: mod_base = OTHER; note = 2'-fluorouridine-3'-phosphate
  modified_base 21: mod_base = OTHER; note = 2'-O-methylguanosine-3'-phosphorothioate
  modified_base 22: mod_base = OTHER; note = 2'-fluorocytidine-3'-phosphorothioate
  modified_base 23: mod_base = OTHER; note = 2'-O-methyluridine-3'-phosphate
aaaaagataaatgtctgcttgct

SEQ ID NO: 57 - RNA, 21 nt, synthetic construct
  source 1..21: mol_type = other RNA; note = Description of Artificial Sequence: Synthetic oligonucleotide
  modified_base 1: mod_base = OTHER; note = 2'-fluorocytidine-3'-phosphate
  modified_base 2: mod_base = OTHER; note = 2'-O-methyladenosine-3'-phosphate
  modified_base 3: mod_base = OTHER; note = 2'-O-methyladenosine-3'-phosphate
  modified_base 4: mod_base = OTHER; note = 2'-O-methylguanosine-3'-phosphate
  modified_base 5: mod_base = OTHER; note = 2'-fluorocytidine-3'-phosphate
  modified_base 6: mod_base = OTHER; note = 2'-O-methyladenosine-3'-phosphate
  modified_base 7: mod_base = OTHER; note = 2'-fluoroguanosine-3'-phosphate
  modified_base 8: mod_base = OTHER; note = 2'-O-methyladenosine-3'-phosphate
  modified_base 9: mod_base = OTHER; note = 2'-fluorocytidine-3'-phosphate
  modified_base 10: mod_base = OTHER; note = 2'-fluoroadenosine-3'-phosphate
  modified_base 11: mod_base = OTHER; note = 2'-fluorouridine-3'-phosphate
  modified_base 12: mod_base = OTHER; note = 2'-O-methyluridine-3'-phosphate
  modified_base 13: mod_base = OTHER; note = 2'-fluorouridine-3'-phosphate
  modified_base 14: mod_base = OTHER; note = 2'-O-methyladenosine-3'-phosphate
  modified_base 15: mod_base = OTHER; note = 2'-O-methyluridine-3'-phosphate
  modified_base 16: mod_base = OTHER; note = 2'-O-methylcytidine-3'-phosphate
  modified_base 17: mod_base = OTHER; note = 2'-fluorouridine-3'-phosphate
  modified_base 18: mod_base = OTHER; note = 2'-O-methyluridine-3'-phosphate
  modified_base 19: mod_base = OTHER; note = 2'-fluorouridine-3'-phosphate
  modified_base 20: mod_base = OTHER; note = 2'-O-methyluridine-3'-phosphate
  modified_base 21: mod_base = OTHER; note = 2'-fluorouridine-3'-phosphate N-[tris(GalNAc-alkyl)-amidodecanoyl)]-4-hydroxyprolinol Hyp-(GalNAc-alkyl)3
caagcagacatttatcttttt

SEQ ID NO: 58 - RNA, 23 nt, synthetic construct
  source 1..23: mol_type = other RNA; note = Description of Artificial Sequence: Synthetic oligonucleotide
  modified_base 1: mod_base = OTHER; note = 2'-O-methyladenosine-3'-phosphate
  modified_base 2: mod_base = OTHER; note = 2'-fluoroadenosine-3'-phosphate
  modified_base 3: mod_base = OTHER; note = 2'-O-methyladenosine-3'-phosphate
  modified_base 4: mod_base = OTHER; note = 2'-fluoroadenosine-3'-phosphate
  modified_base 5: mod_base = OTHER; note = 2'-O-methyladenosine-3'-phosphate
  modified_base 6: mod_base = OTHER; note = 2'-fluoroguanosine-3'-phosphate
  modified_base 7: mod_base = OTHER; note = 2'-O-methyladenosine-3'-phosphate
  modified_base 8: mod_base = OTHER; note = 2'-fluorouridine-3'-phosphate
  modified_base 9: mod_base = OTHER; note = 2'-O-methyladenosine-3'-phosphate
  modified_base 10: mod_base = OTHER; note = 2'-fluoroadenosine-3'-phosphate
  modified_base 11: mod_base = OTHER; note = 2'-O-methyladenosine-3'-phosphate
  modified_base 12: mod_base = OTHER; note = 2'-O-methyluridine-3'-phosphate
  modified_base 13: mod_base = OTHER; note = 2'-O-methylguanosine-3'-phosphate
  modified_base 14: mod_base = OTHER; note = 2'-fluorouridine-3'-phosphate
  modified_base 15: mod_base = OTHER; note = 2'-O-methylcytidine-3'-phosphate
  modified_base 16: mod_base = OTHER; note = 2'-fluorouridine-3'-phosphate
  modified_base 17: mod_base = OTHER; note = 2'-O-methylguanosine-3'-phosphate
  modified_base 18: mod_base = OTHER; note = 2'-fluorocytidine-3'-phosphate
  modified_base 19: mod_base = OTHER; note = 2'-O-methyluridine-3'-phosphate
  modified_base 20: mod_base = OTHER; note = 2'-fluorouridine-3'-phosphate
  modified_base 21: mod_base = OTHER; note = 2'-O-methylguanosine-3'-phosphorothioate
  modified_base 22: mod_base = OTHER; note = 2'-fluorocytidine-3'-phosphorothioate
  modified_base 23: mod_base = OTHER; note = 2'-O-methyluridine-3'-phosphate
aaaaagataaatgtctgcttgct

SEQ ID NO: 59 - RNA, 21 nt, synthetic construct
  source 1..21: mol_type = other RNA; note = Description of Artificial Sequence: Synthetic oligonucleotide
  modified_base 1: mod_base = OTHER; note = 2'-fluorocytidine-3'-phosphate
  modified_base 2: mod_base = OTHER; note = 2'-O-methyladenosine-3'-phosphate
  modified_base 3: mod_base = OTHER; note = 2'-O-methyladenosine-3'-phosphate
  modified_base 4: mod_base = OTHER; note = 2'-O-methylguanosine-3'-phosphate
  modified_base 5: mod_base = OTHER; note = 2'-fluorocytidine-3'-phosphate
  modified_base 6: mod_base = OTHER; note = 2'-O-methyladenosine-3'-phosphate
  modified_base 7: mod_base = OTHER; note = 2'-fluoroguanosine-3'-phosphate
  modified_base 8: mod_base = OTHER; note = 2'-O-methyladenosine-3'-phosphate
  modified_base 9: mod_base = OTHER; note = 2'-fluorocytidine-3'-phosphate
  modified_base 10: mod_base = OTHER; note = 2'-fluoroadenosine-3'-phosphate
  modified_base 11: mod_base = OTHER; note = 2'-fluorouridine-3'-phosphate
  modified_base 12: mod_base = OTHER; note = 2'-O-methyluridine-3'-phosphate
  modified_base 13: mod_base = OTHER; note = 2'-fluorouridine-3'-phosphate
  modified_base 14: mod_base = OTHER; note = 2'-O-methyladenosine-3'-phosphate
  modified_base 15: mod_base = OTHER; note = 2'-O-methyluridine-3'-phosphate
  modified_base 16: mod_base = OTHER; note = 2'-O-methylcytidine-3'-phosphate
  modified_base 17: mod_base = OTHER; note = 2'-fluorouridine-3'-phosphate
  modified_base 18: mod_base = OTHER; note = 2'-O-methyluridine-3'-phosphate
  modified_base 19: mod_base = OTHER; note = 2'-fluorouridine-3'-phosphate
  modified_base 20: mod_base = OTHER; note = 2'-O-methyluridine-3'-phosphate
  modified_base 21: mod_base = OTHER; note = 2'-fluorouridine-3'-phosphate N-[tris(GalNAc-alkyl)-amidodecanoyl)]-4-hydroxyprolinol Hyp-(GalNAc-alkyl)3
caagcagacatttatcttttt

SEQ ID NO: 60 - RNA, 23 nt, synthetic construct
  source 1..23: mol_type = other RNA; note = Description of Artificial Sequence: Synthetic oligonucleotide
  modified_base 1: mod_base = OTHER; note = 2'-O-methyladenosine-3'-phosphate
  modified_base 2: mod_base = OTHER; note = 2'-fluoroadenosine-3'-phosphate
  modified_base 3: mod_base = OTHER; note = 2'-O-methyladenosine-3'-phosphate
  modified_base 4: mod_base = OTHER; note = 2'-fluoroadenosine-3'-phosphate
  modified_base 5: mod_base = OTHER; note = 2'-O-methyladenosine-3'-phosphate
  modified_base 6: mod_base = OTHER; note = 2'-fluoroguanosine-3'-phosphate
  modified_base 7: mod_base = OTHER; note = 2'-O-methyladenosine-3'-phosphate
  modified_base 8: mod_base = OTHER; note = 2'-fluorouridine-3'-phosphate
  modified_base 9: mod_base = OTHER; note = 2'-O-methyladenosine-3'-phosphate
  modified_base 10: mod_base = OTHER; note = 2'-fluoroadenosine-3'-phosphate
  modified_base 11: mod_base = OTHER; note = 2'-O-methyladenosine-3'-phosphate
  modified_base 12: mod_base = OTHER; note = 2'-O-methyluridine-3'-phosphate
  modified_base 13: mod_base = OTHER; note = 2'-O-methylguanosine-3'-phosphate
  modified_base 14: mod_base = OTHER; note = 2'-fluorouridine-3'-phosphate
  modified_base 15: mod_base = OTHER; note = 2'-O-methylcytidine-3'-phosphate
  modified_base 16: mod_base = OTHER; note = 2'-fluorouridine-3'-phosphate
  modified_base 17: mod_base = OTHER; note = 2'-O-methylguanosine-3'-phosphate
  modified_base 18: mod_base = OTHER; note = 2'-fluorocytidine-3'-phosphate
  modified_base 19: mod_base = OTHER; note = 2'-O-methyluridine-3'-phosphate
  modified_base 20: mod_base = OTHER; note = 2'-fluorouridine-3'-phosphate
  modified_base 21: mod_base = OTHER; note = 2'-O-methylguanosine-3'-phosphorothioate
  modified_base 22: mod_base = OTHER; note = 2'-fluorocytidine-3'-phosphorothioate
  modified_base 23: mod_base = OTHER; note = 2'-O-methyluridine-3'-phosphate
aaaaagataaatgtctgcttgct

SEQ ID NO: 61 - RNA, 21 nt, synthetic construct
  source 1..21: mol_type = other RNA; note = Description of Artificial Sequence: Synthetic oligonucleotide
  modified_base 1: mod_base = OTHER; note = 2'-fluorocytidine-3'-phosphate
  modified_base 2: mod_base = OTHER; note = 2'-O-methyladenosine-3'-phosphate
  modified_base 3: mod_base = OTHER; note = 2'-O-methyladenosine-3'-phosphate
  modified_base 4: mod_base = OTHER; note = 2'-O-methylguanosine-3'-phosphate
  modified_base 5: mod_base = OTHER; note = 2'-fluorocytidine-3'-phosphate
  modified_base 6: mod_base = OTHER; note = 2'-O-methyladenosine-3'-phosphate
  modified_base 7: mod_base = OTHER; note = 2'-O-methylguanosine-3'-phosphate
  modified_base 8: mod_base = OTHER; note = 2'-O-methyladenosine-3'-phosphate
  modified_base 9: mod_base = OTHER; note = 2'-fluorocytidine-3'-phosphate
  modified_base 10: mod_base = OTHER; note = 2'-fluoroadenosine-3'-phosphate
  modified_base 11: mod_base = OTHER; note = 2'-fluorouridine-3'-phosphate
  modified_base 12: mod_base = OTHER; note = 2'-O-methyluridine-3'-phosphate
  modified_base 13: mod_base = OTHER; note = 2'-fluorouridine-3'-phosphate
  modified_base 14: mod_base = OTHER; note = 2'-O-methyladenosine-3'-phosphate
  modified_base 15: mod_base = OTHER; note = 2'-O-methyluridine-3'-phosphate
  modified_base 16: mod_base = OTHER; note = 2'-O-methylcytidine-3'-phosphate
  modified_base 17: mod_base = OTHER; note = 2'-fluorouridine-3'-phosphate
  modified_base 18: mod_base = OTHER; note = 2'-O-methyluridine-3'-phosphate
  modified_base 19: mod_base = OTHER; note = 2'-fluorouridine-3'-phosphate
  modified_base 20: mod_base = OTHER; note = 2'-O-methyluridine-3'-phosphate
  modified_base 21: mod_base = OTHER; note = 2'-fluorouridine-3'-phosphate N-[tris(GalNAc-alkyl)-amidodecanoyl)]-4-hydroxyprolinol Hyp-(GalNAc-alkyl)3
caagcagacatttatcttttt

SEQ ID NO: 62 - RNA, 23 nt, synthetic construct
  source 1..23: mol_type = other RNA; note = Description of Artificial Sequence: Synthetic oligonucleotide
  modified_base 1: mod_base = OTHER; note = 2'-O-methyladenosine-3'-phosphate
  modified_base 2: mod_base = OTHER; note = 2'-fluoroadenosine-3'-phosphate
  modified_base 3: mod_base = OTHER; note = 2'-O-methyladenosine-3'-phosphate
  modified_base 4: mod_base = OTHER; note = 2'-fluoroadenosine-3'-phosphate
  modified_base 5: mod_base = OTHER; note = 2'-O-methyladenosine-3'-phosphate
  modified_base 6: mod_base = OTHER; note = 2'-fluoroguanosine-3'-phosphate
  modified_base 7: mod_base = OTHER; note = 2'-O-methyladenosine-3'-phosphate
  modified_base 8: mod_base = OTHER; note = 2'-fluorouridine-3'-phosphate
  modified_base 9: mod_base = OTHER; note = 2'-O-methyladenosine-3'-phosphate
  modified_base 10: mod_base = OTHER; note = 2'-fluoroadenosine-3'-phosphate
  modified_base 11: mod_base = OTHER; note = 2'-O-methyladenosine-3'-phosphate
  modified_base 12: mod_base = OTHER; note = 2'-O-methyluridine-3'-phosphate
  modified_base 13: mod_base = OTHER; note = 2'-O-methylguanosine-3'-phosphate
  modified_base 14: mod_base = OTHER; note = 2'-fluorouridine-3'-phosphate
  modified_base 15: mod_base = OTHER; note = 2'-O-methylcytidine-3'-phosphate
  modified_base 16: mod_base = OTHER; note = 2'-fluorouridine-3'-phosphate
  modified_base 17: mod_base = OTHER; note = 2'-O-methylguanosine-3'-phosphate
  modified_base 18: mod_base = OTHER; note = 2'-fluorocytidine-3'-phosphate
  modified_base 19: mod_base = OTHER; note = 2'-O-methyluridine-3'-phosphate
  modified_base 20: mod_base = OTHER; note = 2'-fluorouridine-3'-phosphate
  modified_base 21: mod_base = OTHER; note = 2'-O-methylguanosine-3'-phosphorothioate
  modified_base 22: mod_base = OTHER; note = 2'-fluorocytidine-3'-phosphorothioate
  modified_base 23: mod_base = OTHER; note = 2'-O-methyluridine-3'-phosphate
aaaaagataaatgtctgcttgct

SEQ ID NO: 63 - RNA, 21 nt, synthetic construct
  source 1..21: mol_type = other RNA; note = Description of Artificial Sequence: Synthetic oligonucleotide
  modified_base 1: mod_base = OTHER; note = 2'-fluorocytidine-3'-phosphate
  modified_base 2: mod_base = OTHER; note = 2'-O-methyladenosine-3'-phosphate
  modified_base 3: mod_base = OTHER; note = 2'-O-methyladenosine-3'-phosphate
  modified_base 4: mod_base = OTHER; note = 2'-O-methylguanosine-3'-phosphate
  modified_base 5: mod_base = OTHER; note = 2'-fluorocytidine-3'-phosphate
  modified_base 6: mod_base = OTHER; note = 2'-O-methyladenosine-3'-phosphate
  modified_base 7: mod_base = OTHER; note = 2'-O-methylguanosine-3'-phosphate
  modified_base 8: mod_base = OTHER; note = 2'-O-methyladenosine-3'-phosphate
  modified_base 9: mod_base = OTHER; note = 2'-fluorocytidine-3'-phosphate
  modified_base 10: mod_base = OTHER; note = 2'-fluoroadenosine-3'-phosphate
  modified_base 11: mod_base = OTHER; note = 2'-fluorouridine-3'-phosphate
  modified_base 12: mod_base = OTHER; note = 2'-O-methyluridine-3'-phosphate
  modified_base 13: mod_base = OTHER; note = 2'-fluorouridine-3'-phosphate
  modified_base 14: mod_base = OTHER; note = 2'-O-methyladenosine-3'-phosphate
  modified_base 15: mod_base = OTHER; note = 2'-O-methyluridine-3'-phosphate
  modified_base 16: mod_base = OTHER; note = 2'-O-methylcytidine-3'-phosphate
  modified_base 17: mod_base = OTHER; note = 2'-fluorouridine-3'-phosphate
  modified_base 18: mod_base = OTHER; note = 2'-O-methyluridine-3'-phosphate
  modified_base 19: mod_base = OTHER; note = 2'-fluorouridine-3'-phosphate
  modified_base 20: mod_base = OTHER; note = 2'-O-methyluridine-3'-phosphate
  modified_base 21: mod_base = OTHER; note = 2'-fluorouridine-3'-phosphate N-[tris(GalNAc-alkyl)-amidodecanoyl)]-4-hydroxyprolinol Hyp-(GalNAc-alkyl)3
caagcagacatttatcttttt

SEQ ID NO: 64 - RNA, 23 nt, synthetic construct
  source 1..23: mol_type = other RNA; note = Description of Artificial Sequence: Synthetic oligonucleotide
  modified_base 1: mod_base = OTHER; note = 2'-O-methyladenosine-3'-phosphate
  modified_base 2: mod_base = OTHER; note = 2'-fluoroadenosine-3'-phosphate
  modified_base 3: mod_base = OTHER; note = 2'-O-methyladenosine-3'-phosphate
  modified_base 4: mod_base = OTHER; note = 2'-fluoroadenosine-3'-phosphate
  modified_base 5: mod_base = OTHER; note = 2'-O-methyladenosine-3'-phosphate
  modified_base 6: mod_base = OTHER; note = 2'-fluoroguanosine-3'-phosphate
  modified_base 7: mod_base = OTHER; note = 2'-O-methyladenosine-3'-phosphate
  modified_base 8: mod_base = OTHER; note = 2'-fluorouridine-3'-phosphate
  modified_base 9: mod_base = OTHER; note = 2'-O-methyladenosine-3'-phosphate
  modified_base 10: mod_base = OTHER; note = 2'-fluoroadenosine-3'-phosphate
  modified_base 11: mod_base = OTHER; note = 2'-O-methyladenosine-3'-phosphate
  modified_base 12: mod_base = OTHER; note = 2'-O-methyluridine-3'-phosphate
  modified_base 13: mod_base = OTHER; note = 2'-O-methylguanosine-3'-phosphate
  modified_base 14: mod_base = OTHER; note = 2'-fluorouridine-3'-phosphate
  modified_base 15: mod_base = OTHER; note = 2'-O-methylcytidine-3'-phosphate
  modified_base 16: mod_base = OTHER; note = 2'-fluorouridine-3'-phosphate
  modified_base 17: mod_base = OTHER; note = 2'-O-methylguanosine-3'-phosphate
  modified_base 18: mod_base = OTHER; note = 2'-fluorocytidine-3'-phosphate
  modified_base 19: mod_base = OTHER; note = 2'-O-methyluridine-3'-phosphate
  modified_base 20: mod_base = OTHER; note = 2'-fluorouridine-3'-phosphate
  modified_base 21: mod_base = OTHER; note = 2'-O-methylguanosine-3'-phosphorothioate
  modified_base 22: mod_base = OTHER; note = 2'-fluorocytidine-3'-phosphorothioate
  modified_base 23: mod_base = OTHER; note = 2'-O-methyluridine-3'-phosphate
aaaaagataaatgtctgcttgct

SEQ ID NO: 65 - RNA, 21 nt, synthetic construct
  source 1..21: mol_type = other RNA; note = Description of Artificial Sequence: Synthetic oligonucleotide
  modified_base 1: mod_base = OTHER; note = 2'-fluorocytidine-3'-phosphate
  modified_base 2: mod_base = OTHER; note = 2'-O-methyladenosine-3'-phosphate
  modified_base 3: mod_base = OTHER; note = 2'-O-methyladenosine-3'-phosphate
  modified_base 4: mod_base = OTHER; note = 2'-O-methylguanosine-3'-phosphate
  modified_base 5: mod_base = OTHER; note = 2'-fluorocytidine-3'-phosphate
  modified_base 6: mod_base = OTHER; note = 2'-O-methyladenosine-3'-phosphate
  modified_base 7: mod_base = OTHER; note = 2'-O-methylguanosine-3'-phosphate
  modified_base 8: mod_base = OTHER; note = 2'-O-methyladenosine-3'-phosphate
  modified_base 9: mod_base = OTHER; note = 2'-fluorocytidine-3'-phosphate
  modified_base 10: mod_base = OTHER; note = 2'-fluoroadenosine-3'-phosphate
  modified_base 11: mod_base = OTHER; note = 2'-fluorouridine-3'-phosphate
  modified_base 12: mod_base = OTHER; note = 2'-O-methyluridine-3'-phosphate
  modified_base 13: mod_base = OTHER; note = 2'-fluorouridine-3'-phosphate
  modified_base 14: mod_base = OTHER; note = 2'-O-methyladenosine-3'-phosphate
  modified_base 15: mod_base = OTHER; note = 2'-O-methyluridine-3'-phosphate
  modified_base 16: mod_base = OTHER; note = 2'-O-methylcytidine-3'-phosphate
  modified_base 17: mod_base = OTHER; note = 2'-fluorouridine-3'-phosphate
  modified_base 18: mod_base = OTHER; note = 2'-O-methyluridine-3'-phosphate
  modified_base 19: mod_base = OTHER; note = 2'-O-methyluridine-3'-phosphate
  modified_base 20: mod_base = OTHER; note = 2'-O-methyluridine-3'-phosphate
  modified_base 21: mod_base = OTHER; note = 2'-fluorouridine-3'-phosphate N-[tris(GalNAc-alkyl)-amidodecanoyl)]-4-hydroxyprolinol Hyp-(GalNAc-alkyl)3
caagcagacatttatcttttt

SEQ ID NO: 66 - RNA, 23 nt, synthetic construct
  source 1..23: mol_type = other RNA; note = Description of Artificial Sequence: Synthetic oligonucleotide
  modified_base 1: mod_base = OTHER; note = 2'-O-methyladenosine-3'-phosphate
  modified_base 2: mod_base = OTHER; note = 2'-fluoroadenosine-3'-phosphate
  modified_base 3: mod_base = OTHER; note = 2'-O-methyladenosine-3'-phosphate
  modified_base 4: mod_base = OTHER; note = 2'-fluoroadenosine-3'-phosphate
  modified_base 5: mod_base = OTHER; note = 2'-O-methyladenosine-3'-phosphate
  modified_base 6: mod_base = OTHER; note = 2'-fluoroguanosine-3'-phosphate
  modified_base 7: mod_base = OTHER; note = 2'-O-methyladenosine-3'-phosphate
  modified_base 8: mod_base = OTHER; note = 2'-fluorouridine-3'-phosphate
  modified_base 9: mod_base = OTHER; note = 2'-O-methyladenosine-3'-phosphate
  modified_base 10: mod_base = OTHER; note = 2'-fluoroadenosine-3'-phosphate
  modified_base 11: mod_base = OTHER; note = 2'-O-methyladenosine-3'-phosphate
  modified_base 12: mod_base = OTHER; note = 2'-O-methyluridine-3'-phosphate
  modified_base 13: mod_base = OTHER; note = 2'-O-methylguanosine-3'-phosphate
  modified_base 14: mod_base = OTHER; note = 2'-fluorouridine-3'-phosphate
  modified_base 15: mod_base = OTHER; note = 2'-O-methylcytidine-3'-phosphate
  modified_base 16: mod_base = OTHER; note = 2'-fluorouridine-3'-phosphate
  modified_base 17: mod_base = OTHER; note = 2'-O-methylguanosine-3'-phosphate
  modified_base 18: mod_base = OTHER; note = 2'-fluorocytidine-3'-phosphate
  modified_base 19: mod_base = OTHER; note = 2'-O-methyluridine-3'-phosphate
  modified_base 20: mod_base = OTHER; note = 2'-fluorouridine-3'-phosphate
  modified_base 21: mod_base = OTHER; note = 2'-O-methylguanosine-3'-phosphorothioate
  modified_base 22: mod_base = OTHER; note = 2'-fluorocytidine-3'-phosphorothioate
  modified_base 23: mod_base = OTHER; note = 2'-O-methyluridine-3'-phosphate
aaaaagataaatgtctgcttgct

SEQ ID NO: 67 - RNA, 21 nt, synthetic construct
  source 1..21: mol_type = other RNA; note = Description of Artificial Sequence: Synthetic oligonucleotide
  modified_base 1: mod_base = OTHER; note = 2'-fluorocytidine-3'-phosphate
  modified_base 2: mod_base = OTHER; note = 2'-O-methyladenosine-3'-phosphate
  modified_base 3: mod_base = OTHER; note = 2'-O-methyladenosine-3'-phosphate
  modified_base 4: mod_base = OTHER; note = 2'-O-methylguanosine-3'-phosphate
  modified_base 5: mod_base = OTHER; note = 2'-fluorocytidine-3'-phosphate
  modified_base 6: mod_base = OTHER; note = 2'-O-methyladenosine-3'-phosphate
  modified_base 7: mod_base = OTHER; note = 2'-O-methylguanosine-3'-phosphate
  modified_base 8: mod_base = OTHER; note = 2'-O-methyladenosine-3'-phosphate
  modified_base 9: mod_base = OTHER; note = 2'-fluorocytidine-3'-phosphate
  modified_base 10: mod_base = OTHER; note = 2'-fluoroadenosine-3'-phosphate
  modified_base 11: mod_base = OTHER; note = 2'-fluorouridine-3'-phosphate
  modified_base 12: mod_base = OTHER; note = 2'-O-methyluridine-3'-phosphate
  modified_base 13: mod_base = OTHER; note = 2'-fluorouridine-3'-phosphate
  modified_base 14: mod_base = OTHER; note = 2'-O-methyladenosine-3'-phosphate
  modified_base 15: mod_base = OTHER; note = 2'-O-methyluridine-3'-phosphate
  modified_base 16: mod_base = OTHER; note = 2'-O-methylcytidine-3'-phosphate
  modified_base 17: mod_base = OTHER; note = 2'-fluorouridine-3'-phosphate
  modified_base 18: mod_base = OTHER; note = 2'-O-methyluridine-3'-phosphate
  modified_base 19: mod_base = OTHER; note = 2'-O-methyluridine-3'-phosphate
  modified_base 20: mod_base = OTHER; note = 2'-O-methyluridine-3'-phosphate
  modified_base 21: mod_base = OTHER; note = 2'-fluorouridine-3'-phosphate N-[tris(GalNAc-alkyl)-amidodecanoyl)]-4-hydroxyprolinol Hyp-(GalNAc-alkyl)3
caagcagacatttatcttttt

SEQ ID NO: 68 - RNA, 23 nt, synthetic construct
  source 1..23: mol_type = other RNA; note = Description of Artificial Sequence: Synthetic oligonucleotide
  modified_base 1: mod_base = OTHER; note = 2'-O-methyladenosine-3'-phosphate
  modified_base 2: mod_base = OTHER; note = 2'-fluoroadenosine-3'-phosphate
  modified_base 3: mod_base = OTHER; note = 2'-O-methyladenosine-3'-phosphate
  modified_base 4: mod_base = OTHER; note = 2'-fluoroadenosine-3'-phosphate
  modified_base 5: mod_base = OTHER; note = 2'-O-methyladenosine-3'-phosphate
  modified_base 6: mod_base = OTHER; note = 2'-fluoroguanosine-3'-phosphate
  modified_base 7: mod_base = OTHER; note = 2'-O-methyladenosine-3'-phosphate
  modified_base 8: mod_base = OTHER; note = 2'-fluorouridine-3'-phosphate
  modified_base 9: mod_base = OTHER; note = 2'-O-methyladenosine-3'-phosphate
  modified_base 10: mod_base = OTHER; note = 2'-fluoroadenosine-3'-phosphate
  modified_base 11: mod_base = OTHER; note = 2'-O-methyladenosine-3'-phosphate
  modified_base 12: mod_base = OTHER; note = 2'-O-methyluridine-3'-phosphate
  modified_base 13: mod_base = OTHER; note = 2'-O-methylguanosine-3'-phosphate
  modified_base 14: mod_base = OTHER; note = 2'-fluorouridine-3'-phosphate
  modified_base 15: mod_base = OTHER; note = 2'-O-methylcytidine-3'-phosphate
  modified_base 16: mod_base = OTHER; note = 2'-fluorouridine-3'-phosphate
  modified_base 17: mod_base = OTHER; note = 2'-O-methylguanosine-3'-phosphate
  modified_base 18: mod_base = OTHER; note = 2'-fluorocytidine-3'-phosphate
  modified_base 19: mod_base = OTHER; note = 2'-O-methyluridine-3'-phosphate
  modified_base 20: mod_base = OTHER; note = 2'-fluorouridine-3'-phosphate
  modified_base 21: mod_base = OTHER; note = 2'-O-methylguanosine-3'-phosphorothioate
  modified_base 22: mod_base = OTHER; note = 2'-fluorocytidine-3'-phosphorothioate
  modified_base 23: mod_base = OTHER; note = 2'-O-methyluridine-3'-phosphate
aaaaagataaatgtctgcttgct

SEQ ID NO: 69 - RNA, 21 nt, synthetic construct
  source 1..21: mol_type = other RNA; note = Description of Artificial Sequence: Synthetic oligonucleotide
  modified_base 1: mod_base = OTHER; note = 2'-fluorocytidine-3'-phosphate
  modified_base 2: mod_base = OTHER; note = 2'-O-methyladenosine-3'-phosphate
  modified_base 3: mod_base = OTHER; note = 2'-O-methyladenosine-3'-phosphate
  modified_base 4: mod_base = OTHER; note = 2'-O-methylguanosine-3'-phosphate
  modified_base 5: mod_base = OTHER; note = 2'-fluorocytidine-3'-phosphate
  modified_base 6: mod_base = OTHER; note = 2'-O-methyladenosine-3'-phosphate
  modified_base 7: mod_base = OTHER; note = 2'-O-methylguanosine-3'-phosphate
  modified_base 8: mod_base = OTHER; note = 2'-O-methyladenosine-3'-phosphate
  modified_base 9: mod_base = OTHER; note = 2'-fluorocytidine-3'-phosphate
  modified_base 10: mod_base = OTHER; note = 2'-fluoroadenosine-3'-phosphate
  modified_base 11: mod_base = OTHER; note = 2'-fluorouridine-3'-phosphate
  modified_base 12: mod_base = OTHER; note = 2'-O-methyluridine-3'-phosphate
  modified_base 13: mod_base = OTHER; note = 2'-fluorouridine-3'-phosphate
  modified_base 14: mod_base = OTHER; note = 2'-O-methyladenosine-3'-phosphate
  modified_base 15: mod_base = OTHER; note = 2'-O-methyluridine-3'-phosphate
  modified_base 16: mod_base = OTHER; note = 2'-O-methylcytidine-3'-phosphate
  modified_base 17: mod_base = OTHER; note = 2'-fluorouridine-3'-phosphate
  modified_base 18: mod_base = OTHER; note = 2'-O-methyluridine-3'-phosphate
  modified_base 19: mod_base = OTHER; note = 2'-O-methyluridine-3'-phosphate
  modified_base 20: mod_base = OTHER; note = 2'-O-methyluridine-3'-phosphate
  modified_base 21: mod_base = OTHER; note = 2'-O-methyluridine-3'-phosphate N-[tris(GalNAc-alkyl)-amidodecanoyl)]-4-hydroxyprolinol Hyp-(GalNAc-alkyl)3
caagcagacatttatcttttt

SEQ ID NO: 70 - RNA, 23 nt, synthetic construct
  source 1..23: mol_type = other RNA; note = Description of Artificial Sequence: Synthetic oligonucleotide
  modified_base 1: mod_base = OTHER; note = 2'-O-methyladenosine-3'-phosphate
  modified_base 2: mod_base = OTHER; note = 2'-fluoroadenosine-3'-phosphate
  modified_base 3: mod_base = OTHER; note = 2'-O-methyladenosine-3'-phosphate
  modified_base 4: mod_base = OTHER; note = 2'-fluoroadenosine-3'-phosphate
  modified_base 5: mod_base = OTHER; note = 2'-O-methyladenosine-3'-phosphate
  modified_base 6: mod_base = OTHER; note = 2'-fluoroguanosine-3'-phosphate
  modified_base 7: mod_base = OTHER; note = 2'-O-methyladenosine-3'-phosphate
  modified_base 8: mod_base = OTHER; note = 2'-fluorouridine-3'-phosphate
  modified_base 9: mod_base = OTHER; note = 2'-O-methyladenosine-3'-phosphate
  modified_base 10: mod_base = OTHER; note = 2'-fluoroadenosine-3'-phosphate
  modified_base 11: mod_base = OTHER; note = 2'-O-methyladenosine-3'-phosphate
  modified_base 12: mod_base = OTHER; note = 2'-O-methyluridine-3'-phosphate
  modified_base 13: mod_base = OTHER; note = 2'-O-methylguanosine-3'-phosphate
  modified_base 14: mod_base = OTHER; note = 2'-fluorouridine-3'-phosphate
  modified_base 15: mod_base = OTHER; note = 2'-O-methylcytidine-3'-phosphate
  modified_base 16: mod_base = OTHER; note = 2'-fluorouridine-3'-phosphate
  modified_base 17: mod_base = OTHER; note = 2'-O-methylguanosine-3'-phosphate
  modified_base 18: mod_base = OTHER; note = 2'-fluorocytidine-3'-phosphate
  modified_base 19: mod_base = OTHER; note = 2'-O-methyluridine-3'-phosphate
  modified_base 20: mod_base = OTHER; note = 2'-fluorouridine-3'-phosphate
  modified_base 21: mod_base = OTHER; note = 2'-O-methylguanosine-3'-phosphorothioate
  modified_base 22: mod_base = OTHER; note = 2'-fluorocytidine-3'-phosphorothioate
  modified_base 23: mod_base = OTHER; note = 2'-O-methyluridine-3'-phosphate
aaaaagataaatgtctgcttgct

SEQ ID NO: 71 - RNA, 21 nt, synthetic construct
  source 1..21: mol_type = other RNA; note = Description of Artificial Sequence: Synthetic oligonucleotide
  modified_base 1: mod_base = OTHER; note = 2'-fluorocytidine-3'-phosphate
  modified_base 2: mod_base = OTHER; note = 2'-O-methyladenosine-3'-phosphate
  modified_base 3: mod_base = OTHER; note = 2'-O-methyladenosine-3'-phosphate
  modified_base 4: mod_base = OTHER; note = 2'-O-methylguanosine-3'-phosphate
  modified_base 5: mod_base = OTHER; note = 2'-fluorocytidine-3'-phosphate
  modified_base 6: mod_base = OTHER; note = 2'-O-methyladenosine-3'-phosphate
  modified_base 7: mod_base = OTHER; note = 2'-O-methylguanosine-3'-phosphate
  modified_base 8: mod_base = OTHER; note = 2'-O-methyladenosine-3'-phosphate
  modified_base 9: mod_base = OTHER; note = 2'-fluorocytidine-3'-phosphate
  modified_base 10: mod_base = OTHER; note = 2'-fluoroadenosine-3'-phosphate
  modified_base 11: mod_base = OTHER; note = 2'-fluorouridine-3'-phosphate
  modified_base 12: mod_base = OTHER; note = 2'-O-methyluridine-3'-phosphate
  modified_base 13: mod_base = OTHER; note = 2'-fluorouridine-3'-phosphate
  modified_base 14: mod_base = OTHER; note = 2'-O-methyladenosine-3'-phosphate
  modified_base 15: mod_base = OTHER; note = 2'-O-methyluridine-3'-phosphate
  modified_base 16: mod_base = OTHER; note = 2'-O-methylcytidine-3'-phosphate
  modified_base 17: mod_base = OTHER; note = 2'-fluorouridine-3'-phosphate
  modified_base 18: mod_base = OTHER; note = 2'-O-methyluridine-3'-phosphate
  modified_base 19: mod_base = OTHER; note = 2'-O-methyluridine-3'-phosphate
  modified_base 20: mod_base = OTHER; note = 2'-O-methyluridine-3'-phosphate
  modified_base 21: mod_base = OTHER; note = 2'-O-methyluridine-3'-phosphate N-[tris(GalNAc-alkyl)-amidodecanoyl)]-4-hydroxyprolinol Hyp-(GalNAc-alkyl)3
caagcagacatttatcttttt

SEQ ID NO: 72 - RNA, 23 nt, synthetic construct
  source 1..23: mol_type = other RNA; note = Description of Artificial Sequence: Synthetic oligonucleotide
  modified_base 1: mod_base = OTHER; note = 2'-O-methyladenosine-3'-phosphate
  modified_base 2: mod_base = OTHER; note = 2'-fluoroadenosine-3'-phosphate
  modified_base 3: mod_base = OTHER; note = 2'-O-methyladenosine-3'-phosphate
  modified_base 4: mod_base = OTHER; note = 2'-fluoroadenosine-3'-phosphate
  modified_base 5: mod_base = OTHER; note = 2'-O-methyladenosine-3'-phosphate
  modified_base 6: mod_base = OTHER; note = 2'-fluoroguanosine-3'-phosphate
  modified_base 7: mod_base = OTHER; note = 2'-O-methyladenosine-3'-phosphate
  modified_base 8: mod_base = OTHER; note = 2'-fluorouridine-3'-phosphate
  modified_base 9: mod_base = OTHER; note = 2'-O-methyladenosine-3'-phosphate
  modified_base 10: mod_base = OTHER; note = 2'-fluoroadenosine-3'-phosphate
  modified_base 11: mod_base = OTHER; note = 2'-O-methyladenosine-3'-phosphate
  modified_base 12: mod_base = OTHER; note = 2'-O-methyluridine-3'-phosphate
  modified_base 13: mod_base = OTHER; note = 2'-O-methylguanosine-3'-phosphate
  modified_base 14: mod_base = OTHER; note = 2'-fluorouridine-3'-phosphate
  modified_base 15: mod_base = OTHER; note = 2'-O-methylcytidine-3'-phosphate
  modified_base 16: mod_base = OTHER; note = 2'-fluorouridine-3'-phosphate
  modified_base 17: mod_base = OTHER; note = 2'-O-methylguanosine-3'-phosphate
  modified_base 18: mod_base = OTHER; note = 2'-fluorocytidine-3'-phosphate
  modified_base 19: mod_base = OTHER; note = 2'-O-methyluridine-3'-phosphate
  modified_base 20: mod_base = OTHER; note = 2'-fluorouridine-3'-phosphate
  modified_base 21: mod_base = OTHER; note = 2'-O-methylguanosine-3'-phosphorothioate
  modified_base 22: mod_base = OTHER; note = 2'-fluorocytidine-3'-phosphorothioate
  modified_base 23: mod_base = OTHER; note = 2'-O-methyluridine-3'-phosphate
aaaaagataaatgtctgcttgct

SEQ ID NO: 73 - RNA, 21 nt, synthetic construct
  source 1..21: mol_type = other RNA; note = Description of Artificial Sequence: Synthetic oligonucleotide
  modified_base 1: mod_base = OTHER; note = 2'-fluorocytidine-3'-phosphate
  modified_base 2: mod_base = OTHER; note = 2'-O-methyladenosine-3'-phosphate
  modified_base 3: mod_base = OTHER; note = 2'-O-methyladenosine-3'-phosphate
  modified_base 4: mod_base = OTHER; note = 2'-O-methylguanosine-3'-phosphate
  modified_base 5: mod_base = OTHER; note = 2'-fluorocytidine-3'-phosphate
  modified_base 6: mod_base = OTHER; note = 2'-O-methyladenosine-3'-phosphate
  modified_base 7: mod_base = OTHER; note = 2'-O-methylguanosine-3'-phosphate
  modified_base 8: mod_base = OTHER; note = 2'-O-methyladenosine-3'-phosphate
  modified_base 9: mod_base = OTHER; note = 2'-fluorocytidine-3'-phosphate
  modified_base 10: mod_base = OTHER; note = 2'-fluoroadenosine-3'-phosphate
  modified_base 11: mod_base = OTHER; note = 2'-fluorouridine-3'-phosphate
  modified_base 12: mod_base = OTHER; note = 2'-O-methyluridine-3'-phosphate
  modified_base 13: mod_base = OTHER; note = 2'-fluorouridine-3'-phosphate
  modified_base 14: mod_base = OTHER; note = 2'-O-methyladenosine-3'-phosphate
  modified_base 15: mod_base = OTHER; note = 2'-O-methyluridine-3'-phosphate
  modified_base 16: mod_base = OTHER; note = 2'-O-methylcytidine-3'-phosphate
  modified_base 17: mod_base = OTHER; note = 2'-O-methyluridine-3'-phosphate
  modified_base 18: mod_base = OTHER; note = 2'-O-methyluridine-3'-phosphate
  modified_base 19: mod_base = OTHER; note = 2'-O-methyluridine-3'-phosphate
  modified_base 20: mod_base = OTHER; note = 2'-O-methyluridine-3'-phosphate
  modified_base 21: mod_base = OTHER; note = 2'-O-methyluridine-3'-phosphate N-[tris(GalNAc-alkyl)-amidodecanoyl)]-4-hydroxyprolinol Hyp-(GalNAc-alkyl)3
caagcagacatttatcttttt

SEQ ID NO: 74 - RNA, 23 nt, synthetic construct
  source 1..23: mol_type = other RNA; note = Description of Artificial Sequence: Synthetic oligonucleotide
  modified_base 1: mod_base = OTHER; note = 2'-O-methyladenosine-3'-phosphate
  modified_base 2: mod_base = OTHER; note = 2'-fluoroadenosine-3'-phosphate
  modified_base 3: mod_base = OTHER; note = 2'-O-methyladenosine-3'-phosphate
  modified_base 4: mod_base = OTHER; note = 2'-fluoroadenosine-3'-phosphate
  modified_base 5: mod_base = OTHER; note = 2'-O-methyladenosine-3'-phosphate
  modified_base 6: mod_base = OTHER; note = 2'-fluoroguanosine-3'-phosphate
  modified_base 7: mod_base = OTHER; note = 2'-O-methyladenosine-3'-phosphate
  modified_base 8: mod_base = OTHER; note = 2'-fluorouridine-3'-phosphate
  modified_base 9: mod_base = OTHER; note = 2'-O-methyladenosine-3'-phosphate
  modified_base 10: mod_base = OTHER; note = 2'-fluoroadenosine-3'-phosphate
  modified_base 11: mod_base = OTHER; note = 2'-O-methyladenosine-3'-phosphate
  modified_base 12: mod_base = OTHER; note = 2'-O-methyluridine-3'-phosphate
  modified_base 13: mod_base = OTHER; note = 2'-O-methylguanosine-3'-phosphate
  modified_base 14: mod_base = OTHER; note = 2'-fluorouridine-3'-phosphate
  modified_base 15: mod_base = OTHER; note = 2'-O-methylcytidine-3'-phosphate
  modified_base 16: mod_base = OTHER; note = 2'-fluorouridine-3'-phosphate
  modified_base 17: mod_base = OTHER; note = 2'-O-methylguanosine-3'-phosphate
  modified_base 18: mod_base = OTHER; note = 2'-fluorocytidine-3'-phosphate
  modified_base 19: mod_base = OTHER; note = 2'-O-methyluridine-3'-phosphate
  modified_base 20: mod_base = OTHER; note = 2'-fluorouridine-3'-phosphate
  modified_base 21: mod_base = OTHER; note = 2'-O-methylguanosine-3'-phosphorothioate
  modified_base 22: mod_base = OTHER; note = 2'-fluorocytidine-3'-phosphorothioate
  modified_base 23: mod_base = OTHER; note = 2'-O-methyluridine-3'-phosphate
aaaaagataaatgtctgcttgct

SEQ ID NO: 75 - RNA, 21 nt, synthetic construct
  source 1..21: mol_type = other RNA; note = Description of Artificial Sequence: Synthetic oligonucleotide
  modified_base 1: mod_base = OTHER; note = 2'-fluorocytidine-3'-phosphate
  modified_base 2: mod_base = OTHER; note = 2'-O-methyladenosine-3'-phosphate
  modified_base 3: mod_base = OTHER; note = 2'-O-methyladenosine-3'-phosphate
  modified_base 4: mod_base = OTHER; note = 2'-O-methylguanosine-3'-phosphate
  modified_base 5: mod_base = OTHER; note = 2'-O-methylcytidine-3'-phosphate
  modified_base 6: mod_base = OTHER; note = 2'-O-methyladenosine-3'-phosphate
  modified_base 7: mod_base = OTHER; note = 2'-O-methylguanosine-3'-phosphate
  modified_base 8: mod_base = OTHER; note = 2'-O-methyladenosine-3'-phosphate
  modified_base 9: mod_base = OTHER; note = 2'-fluorocytidine-3'-phosphate
  modified_base 10: mod_base = OTHER; note = 2'-fluoroadenosine-3'-phosphate
  modified_base 11: mod_base = OTHER; note = 2'-fluorouridine-3'-phosphate
  modified_base 12: mod_base = OTHER; note = 2'-O-methyluridine-3'-phosphate
  modified_base 13: mod_base = OTHER; note = 2'-fluorouridine-3'-phosphate
  modified_base 14: mod_base = OTHER; note = 2'-O-methyladenosine-3'-phosphate
  modified_base 15: mod_base = OTHER; note = 2'-O-methyluridine-3'-phosphate
  modified_base 16: mod_base = OTHER; note = 2'-O-methylcytidine-3'-phosphate
  modified_base 17: mod_base = OTHER; note = 2'-O-methyluridine-3'-phosphate
  modified_base 18: mod_base = OTHER; note = 2'-O-methyluridine-3'-phosphate
  modified_base 19: mod_base = OTHER; note = 2'-O-methyluridine-3'-phosphate
  modified_base 20: mod_base = OTHER; note = 2'-O-methyluridine-3'-phosphate
  modified_base 21: mod_base = OTHER; note = 2'-O-methyluridine-3'-phosphate N-[tris(GalNAc-alkyl)-amidodecanoyl)]-4-hydroxyprolinol Hyp-(GalNAc-alkyl)3
caagcagacatttatcttttt

SEQ ID NO: 76 - RNA, 23 nt, synthetic construct
  source 1..23: mol_type = other RNA; note = Description of Artificial Sequence: Synthetic oligonucleotide
  modified_base 1: mod_base = OTHER; note = 2'-O-methyladenosine-3'-phosphate
  modified_base 2: mod_base = OTHER; note = 2'-fluoroadenosine-3'-phosphate
  modified_base 3: mod_base = OTHER; note = 2'-O-methyladenosine-3'-phosphate
  modified_base 4: mod_base = OTHER; note = 2'-fluoroadenosine-3'-phosphate
  modified_base 5: mod_base = OTHER; note = 2'-O-methyladenosine-3'-phosphate
  modified_base 6: mod_base = OTHER; note = 2'-fluoroguanosine-3'-phosphate
  modified_base 7: mod_base = OTHER; note = 2'-O-methyladenosine-3'-phosphate
  modified_base 8: mod_base = OTHER; note = 2'-fluorouridine-3'-phosphate
  modified_base 9: mod_base = OTHER; note = 2'-O-methyladenosine-3'-phosphate
  modified_base 10: mod_base = OTHER; note = 2'-fluoroadenosine-3'-phosphate
  modified_base 11: mod_base = OTHER; note = 2'-O-methyladenosine-3'-phosphate
  modified_base 12: mod_base = OTHER; note = 2'-O-methyluridine-3'-phosphate
  modified_base 13: mod_base = OTHER; note = 2'-O-methylguanosine-3'-phosphate
  modified_base 14: mod_base = OTHER; note = 2'-fluorouridine-3'-phosphate
  modified_base 15: mod_base = OTHER; note = 2'-O-methylcytidine-3'-phosphate
  modified_base 16: mod_base = OTHER; note = 2'-fluorouridine-3'-phosphate
  modified_base 17: mod_base = OTHER; note = 2'-O-methylguanosine-3'-phosphate
  modified_base 18: mod_base = OTHER; note = 2'-fluorocytidine-3'-phosphate
  modified_base 19: mod_base = OTHER; note = 2'-O-methyluridine-3'-phosphate
  modified_base 20: mod_base = OTHER; note = 2'-fluorouridine-3'-phosphate
  modified_base 21: mod_base = OTHER; note = 2'-O-methylguanosine-3'-phosphorothioate
  modified_base 22: mod_base = OTHER; note = 2'-fluorocytidine-3'-phosphorothioate
  modified_base 23: mod_base = OTHER; note = 2'-O-methyluridine-3'-phosphate
aaaaagataaatgtctgcttgct

SEQ ID NO: 77 - RNA, 21 nt, synthetic construct
  source 1..21: mol_type = other RNA; note = Description of Artificial Sequence: Synthetic oligonucleotide
  modified_base 1: mod_base = OTHER; note = 2'-fluorocytidine-3'-phosphate
  modified_base 2: mod_base = OTHER; note = 2'-O-methyladenosine-3'-phosphate
  modified_base 3: mod_base = OTHER; note = 2'-O-methyladenosine-3'-phosphate
  modified_base 4: mod_base = OTHER; note = 2'-O-methylguanosine-3'-phosphate
  modified_base 5: mod_base = OTHER; note = 2'-O-methylcytidine-3'-phosphate
  modified_base 6: mod_base = OTHER; note = 2'-O-methyladenosine-3'-phosphate
  modified_base 7: mod_base = OTHER; note = 2'-O-methylguanosine-3'-phosphate
  modified_base 8: mod_base = OTHER; note = 2'-O-methyladenosine-3'-phosphate
  modified_base 9: mod_base = OTHER; note = 2'-fluorocytidine-3'-phosphate
  modified_base 10: mod_base = OTHER; note = 2'-fluoroadenosine-3'-phosphate
  modified_base 11: mod_base = OTHER; note = 2'-fluorouridine-3'-phosphate
  modified_base 12: mod_base = OTHER; note = 2'-O-methyluridine-3'-phosphate
  modified_base 13: mod_base = OTHER; note = 2'-O-methyluridine-3'-phosphate
  modified_base 14: mod_base = OTHER; note = 2'-O-methyladenosine-3'-phosphate
  modified_base 15: mod_base = OTHER; note = 2'-O-methyluridine-3'-phosphate
  modified_base 16: mod_base = OTHER; note = 2'-O-methylcytidine-3'-phosphate
  modified_base 17: mod_base = OTHER; note = 2'-O-methyluridine-3'-phosphate
  modified_base 18: mod_base = OTHER; note = 2'-O-methyluridine-3'-phosphate
  modified_base 19: mod_base = OTHER; note = 2'-O-methyluridine-3'-phosphate
  modified_base 20: mod_base = OTHER; note = 2'-O-methyluridine-3'-phosphate
  modified_base 21: mod_base = OTHER; note = 2'-O-methyluridine-3'-phosphate N-[tris(GalNAc-alkyl)-amidodecanoyl)]-4-hydroxyprolinol Hyp-(GalNAc-alkyl)3
caagcagacatttatcttttt

SEQ ID NO: 78 - RNA, 23 nt, synthetic construct
  source 1..23: mol_type = other RNA; note = Description of Artificial Sequence: Synthetic oligonucleotide
  modified_base 1: mod_base = OTHER; note = 2'-O-methyladenosine-3'-phosphate
  modified_base 2: mod_base = OTHER; note = 2'-fluoroadenosine-3'-phosphate
  modified_base 3: mod_base = OTHER; note = 2'-O-methyladenosine-3'-phosphate
  modified_base 4: mod_base = OTHER; note = 2'-fluoroadenosine-3'-phosphate
  modified_base 5: mod_base = OTHER; note = 2'-O-methyladenosine-3'-phosphate
  modified_base 6: mod_base = OTHER; note = 2'-fluoroguanosine-3'-phosphate
  modified_base 7: mod_base = OTHER; note = 2'-O-methyladenosine-3'-phosphate
  modified_base 8: mod_base = OTHER; note = 2'-fluorouridine-3'-phosphate
  modified_base 9: mod_base = OTHER; note = 2'-O-methyladenosine-3'-phosphate
  modified_base 10: mod_base = OTHER; note = 2'-fluoroadenosine-3'-phosphate
  modified_base 11: mod_base = OTHER; note = 2'-O-methyladenosine-3'-phosphate
  modified_base 12: mod_base = OTHER; note = 2'-O-methyluridine-3'-phosphate
  modified_base 13: mod_base = OTHER; note = 2'-O-methylguanosine-3'-phosphate
  modified_base 14: mod_base = OTHER; note = 2'-fluorouridine-3'-phosphate
  modified_base 15: mod_base = OTHER; note = 2'-O-methylcytidine-3'-phosphate
  modified_base 16: mod_base = OTHER; note = 2'-fluorouridine-3'-phosphate
  modified_base 17: mod_base = OTHER; note = 2'-O-methylguanosine-3'-phosphate
  modified_base 18: mod_base = OTHER; note = 2'-fluorocytidine-3'-phosphate
  modified_base 19: mod_base = OTHER; note = 2'-O-methyluridine-3'-phosphate
  modified_base 20: mod_base = OTHER; note = 2'-fluorouridine-3'-phosphate
  modified_base 21: mod_base = OTHER; note = 2'-O-methylguanosine-3'-phosphorothioate
  modified_base 22: mod_base = OTHER; note = 2'-fluorocytidine-3'-phosphorothioate
  modified_base 23: mod_base = OTHER; note = 2'-O-methyluridine-3'-phosphate
aaaaagataaatgtctgcttgct

SEQ ID NO: 79 - RNA, 21 nt, synthetic construct
  source 1..21: mol_type = other RNA; note = Description of Artificial Sequence: Synthetic oligonucleotide
  modified_base 1: mod_base = OTHER; note = 2'-fluorocytidine-3'-phosphate
  modified_base 2: mod_base = OTHER; note = 2'-O-methyladenosine-3'-phosphate
  modified_base 3: mod_base = OTHER; note = 2'-fluoroadenosine-3'-phosphate
  modified_base 4: mod_base = OTHER; note = 2'-fluoroguanosine-3'-phosphate
  modified_base 5: mod_base = OTHER; note = 2'-fluorocytidine-3'-phosphate
  modified_base 6: mod_base = OTHER; note = 2'-O-methyladenosine-3'-phosphate
  modified_base 7: mod_base = OTHER; note = 2'-fluoroguanosine-3'-phosphate
  modified_base 8: mod_base = OTHER; note = 2'-O-methyladenosine-3'-phosphate
  modified_base 9: mod_base = OTHER; note = 2'-fluorocytidine-3'-phosphate
  modified_base 10: mod_base = OTHER; note = 2'-fluoroadenosine-3'-phosphate
  modified_base 11: mod_base = OTHER; note = 2'-fluorouridine-3'-phosphate
  modified_base 12: mod_base = OTHER; note = 2'-O-methyluridine-3'-phosphate
  modified_base 13: mod_base = OTHER; note = 2'-fluorouridine-3'-phosphate
  modified_base 14: mod_base = OTHER; note = 2'-O-methyladenosine-3'-phosphate
  modified_base 15: mod_base = OTHER; note = 2'-fluorouridine-3'-phosphate
  modified_base 16: mod_base = OTHER; note = 2'-O-methylcytidine-3'-phosphate
  modified_base 17: mod_base = OTHER; note = 2'-fluorouridine-3'-phosphate
  modified_base 18: mod_base = OTHER; note = 2'-O-methyluridine-3'-phosphate
  modified_base 19: mod_base = OTHER; note = 2'-fluorouridine-3'-phosphate
  modified_base 20: mod_base = OTHER; note = 2'-O-methyluridine-3'-phosphate
  modified_base 21: mod_base = OTHER; note = 2'-fluorouridine-3'-phosphate N-[tris(GalNAc-alkyl)-amidodecanoyl)]-4-hydroxyprolinol Hyp-(GalNAc-alkyl)3
caagcagacatttatcttttt

SEQ ID NO: 80 - RNA, 23 nt, synthetic construct
  source 1..23: mol_type = other RNA; note = Description of Artificial Sequence: Synthetic oligonucleotide
  modified_base 1: mod_base = OTHER; note = 2'-O-methyladenosine-3'-phosphate
  modified_base 2: mod_base = OTHER; note = 2'-fluoroadenosine-3'-phosphate
  modified_base 3: mod_base = OTHER; note = 2'-O-methyladenosine-3'-phosphate
  modified_base 4: mod_base = OTHER; note = 2'-fluoroadenosine-3'-phosphate
  modified_base 5: mod_base = OTHER; note = 2'-O-methyladenosine-3'-phosphate
  modified_base 6: mod_base = OTHER; note = 2'-fluoroguanosine-3'-phosphate
  modified_base 7: mod_base = OTHER; note = 2'-O-methyladenosine-3'-phosphate
  modified_base 8: mod_base = OTHER; note = 2'-fluorouridine-3'-phosphate
  modified_base 9: mod_base = OTHER; note = 2'-O-methyladenosine-3'-phosphate
  modified_base 10: mod_base = OTHER; note = 2'-fluoroadenosine-3'-phosphate
  modified_base 11: mod_base = OTHER; note = 2'-O-methyladenosine-3'-phosphate
  modified_base 12: mod_base = OTHER; note = 2'-O-methyluridine-3'-phosphate
  modified_base 13: mod_base = OTHER; note = 2'-O-methylguanosine-3'-phosphate
  modified_base 14: mod_base = OTHER; note = 2'-fluorouridine-3'-phosphate
  modified_base 15: mod_base = OTHER; note = 2'-O-methylcytidine-3'-phosphate
  modified_base 16: mod_base = OTHER; note = 2'-fluorouridine-3'-phosphate
  modified_base 17: mod_base = OTHER; note = 2'-O-methylguanosine-3'-phosphate
  modified_base 18: mod_base = OTHER; note = 2'-fluorocytidine-3'-phosphate
  modified_base 19: mod_base = OTHER; note = 2'-O-methyluridine-3'-phosphate
  modified_base 20: mod_base = OTHER; note = 2'-fluorouridine-3'-phosphate
  modified_base 21: mod_base = OTHER; note = 2'-O-methylguanosine-3'-phosphorothioate
  modified_base 22: mod_base = OTHER; note = 2'-fluorocytidine-3'-phosphorothioate
  modified_base 23: mod_base = OTHER; note = 2'-O-methyluridine-3'-phosphate
aaaaagataaatgtctgcttgct

SEQ ID NO: 81 - RNA, 21 nt, synthetic construct
  source 1..21: mol_type = other RNA; note = Description of Artificial Sequence: Synthetic oligonucleotide
  modified_base 1: mod_base = OTHER; note = 2'-fluorocytidine-3'-phosphate
  modified_base 2: mod_base = OTHER; note = 2'-O-methyladenosine-3'-phosphate
  modified_base 3: mod_base = OTHER; note = 2'-fluoroadenosine-3'-phosphate
  modified_base 4: mod_base = OTHER; note = 2'-fluoroguanosine-3'-phosphate
  modified_base 5: mod_base = OTHER; note = 2'-fluorocytidine-3'-phosphate
  modified_base 6: mod_base = OTHER; note = 2'-O-methyladenosine-3'-phosphate
  modified_base 7: mod_base = OTHER; note = 2'-fluoroguanosine-3'-phosphate
  modified_base 8: mod_base = OTHER; note = 2'-O-methyladenosine-3'-phosphate
  modified_base 9: mod_base = OTHER; note = 2'-fluorocytidine-3'-phosphate
  modified_base 10: mod_base = OTHER; note = 2'-fluoroadenosine-3'-phosphate
  modified_base 11: mod_base = OTHER; note = 2'-fluorouridine-3'-phosphate
  modified_base 12: mod_base = OTHER; note = 2'-O-methyluridine-3'-phosphate
  modified_base 13: mod_base = OTHER; note = 2'-fluorouridine-3'-phosphate
  modified_base 14: mod_base = OTHER; note = 2'-O-methyladenosine-3'-phosphate
  modified_base 15: mod_base = OTHER; note = 2'-fluorouridine-3'-phosphate
  modified_base 16: mod_base = OTHER; note = 2'-O-methylcytidine-3'-phosphate
  modified_base 17: mod_base = OTHER; note = 2'-fluorouridine-3'-phosphate
  modified_base 18: mod_base = OTHER; note = 2'-O-methyluridine-3'-phosphate
  modified_base 19: mod_base = OTHER; note = 2'-fluorouridine-3'-phosphate
  modified_base 20: mod_base = OTHER; note = 2'-O-methyluridine-3'-phosphate
  modified_base 21: mod_base = OTHER; note = 2'-fluorouridine-3'-phosphate N-[tris(GalNAc-alkyl)-amidodecanoyl)]-4-hydroxyprolinol Hyp-(GalNAc-alkyl)3
caagcagacatttatcttttt

SEQ ID NO: 82 - RNA, 23 nt, synthetic construct
  source 1..23: mol_type = other RNA; note = Description of Artificial Sequence: Synthetic oligonucleotide
  modified_base 1: mod_base = OTHER; note = 2'-O-methyladenosine-3'-phosphate
  modified_base 2: mod_base = OTHER; note = 2'-fluoroadenosine-3'-phosphate
  modified_base 3: mod_base = OTHER; note = 2'-O-methyladenosine-3'-phosphate
  modified_base 4: mod_base = OTHER; note = 2'-fluoroadenosine-3'-phosphate
  modified_base 5: mod_base = OTHER; note = 2'-O-methyladenosine-3'-phosphate
  modified_base 6: mod_base = OTHER; note = 2'-fluoroguanosine-3'-phosphate
  modified_base 7: mod_base = OTHER; note = 2'-O-methyladenosine-3'-phosphate
  modified_base 8: mod_base = OTHER; note = 2'-fluorouridine-3'-phosphate
  modified_base 9: mod_base = OTHER; note = 2'-O-methyladenosine-3'-phosphate
  modified_base 10: mod_base = OTHER; note = 2'-fluoroadenosine-3'-phosphate
  modified_base 11: mod_base = OTHER; note = 2'-O-methyladenosine-3'-phosphate
  modified_base 12: mod_base = OTHER; note = 2'-O-methyluridine-3'-phosphate
  modified_base 13: mod_base = OTHER; note = 2'-O-methylguanosine-3'-phosphate
  modified_base 14: mod_base = OTHER; note = 2'-fluorouridine-3'-phosphate
  modified_base 15: mod_base = OTHER; note = 2'-O-methylcytidine-3'-phosphate
  modified_base 16: mod_base = OTHER; note = 2'-fluorouridine-3'-phosphate
  modified_base 17: mod_base = OTHER; note = 2'-O-methylguanosine-3'-phosphate
  modified_base 18: mod_base = OTHER; note = 2'-fluorocytidine-3'-phosphate
  modified_base 19: mod_base = OTHER; note = 2'-O-methyluridine-3'-phosphate
  modified_base 20: mod_base = OTHER; note = 2'-fluorouridine-3'-phosphate
  modified_base 21: mod_base = OTHER; note = 2'-O-methylguanosine-3'-phosphorothioate
  modified_base 22: mod_base = OTHER; note = 2'-fluorocytidine-3'-phosphorothioate
  modified_base 23: mod_base = OTHER; note = 2'-O-methyluridine-3'-phosphate
aaaaagataaatgtctgcttgct

SEQ ID NO: 83 - RNA, 21 nt, synthetic construct
  source 1..21: mol_type = other RNA; note = Description of Artificial Sequence: Synthetic oligonucleotide
  modified_base 1: mod_base = OTHER; note = 2'-fluorocytidine-3'-phosphate
  modified_base 2: mod_base = OTHER; note = 2'-O-methyladenosine-3'-phosphate
  modified_base 3: mod_base = OTHER; note = 2'-fluoroadenosine-3'-phosphate
  modified_base 4: mod_base = OTHER; note = 2'-fluoroguanosine-3'-phosphate
  modified_base 5: mod_base = OTHER; note = 2'-fluorocytidine-3'-phosphate
  modified_base 6: mod_base = OTHER; note = 2'-O-methyladenosine-3'-phosphate
  modified_base 7: mod_base = OTHER; note = 2'-fluoroguanosine-3'-phosphate
  modified_base 8: mod_base = OTHER; note = 2'-O-methyladenosine-3'-phosphate
  modified_base 9: mod_base = OTHER; note = 2'-fluorocytidine-3'-phosphate
  modified_base 10: mod_base = OTHER; note = 2'-fluoroadenosine-3'-phosphate
  modified_base 11: mod_base = OTHER; note = 2'-fluorouridine-3'-phosphate
  modified_base 12: mod_base = OTHER; note = 2'-O-methyluridine-3'-phosphate
  modified_base 13: mod_base = OTHER; note = 2'-fluorouridine-3'-phosphate
  modified_base 14: mod_base = OTHER; note = 2'-fluoroadenosine-3'-phosphate
  modified_base 15: mod_base = OTHER; note = 2'-fluorouridine-3'-phosphate
  modified_base 16: mod_base = OTHER; note = 2'-O-methylcytidine-3'-phosphate
  modified_base 17: mod_base = OTHER; note = 2'-fluorouridine-3'-phosphate
  modified_base 18: mod_base = OTHER; note = 2'-O-methyluridine-3'-phosphate
  modified_base 19: mod_base = OTHER; note = 2'-fluorouridine-3'-phosphate
  modified_base 20: mod_base = OTHER; note = 2'-O-methyluridine-3'-phosphate
  modified_base 21: mod_base = OTHER; note = 2'-fluorouridine-3'-phosphate N-[tris(GalNAc-alkyl)-amidodecanoyl)]-4-hydroxyprolinol Hyp-(GalNAc-alkyl)3
caagcagacatttatcttttt

SEQ ID NO: 84 - RNA, 23 nt, synthetic construct
  source 1..23: mol_type = other RNA; note = Description of Artificial Sequence: Synthetic oligonucleotide
  modified_base 1: mod_base = OTHER; note = 2'-O-methyladenosine-3'-phosphate
  modified_base 2: mod_base = OTHER; note = 2'-fluoroadenosine-3'-phosphate
  modified_base 3: mod_base = OTHER; note = 2'-O-methyladenosine-3'-phosphate
  modified_base 4: mod_base = OTHER; note = 2'-fluoroadenosine-3'-phosphate
  modified_base 5: mod_base = OTHER; note = 2'-O-methyladenosine-3'-phosphate
  modified_base 6: mod_base = OTHER; note = 2'-fluoroguanosine-3'-phosphate
  modified_base 7: mod_base = OTHER; note = 2'-O-methyladenosine-3'-phosphate
  modified_base 8: mod_base = OTHER; note = 2'-fluorouridine-3'-phosphate
  modified_base 9: mod_base = OTHER; note = 2'-O-methyladenosine-3'-phosphate
  modified_base 10: mod_base = OTHER; note = 2'-fluoroadenosine-3'-phosphate
  modified_base 11: mod_base = OTHER; note = 2'-O-methyladenosine-3'-phosphate
  modified_base 12: mod_base = OTHER; note = 2'-O-methyluridine-3'-phosphate
  modified_base 13: mod_base = OTHER; note = 2'-O-methylguanosine-3'-phosphate
  modified_base 14: mod_base = OTHER; note = 2'-fluorouridine-3'-phosphate
  modified_base 15: mod_base = OTHER; note = 2'-O-methylcytidine-3'-phosphate
  modified_base 16: mod_base = OTHER; note = 2'-fluorouridine-3'-phosphate
  modified_base 17: mod_base = OTHER; note = 2'-O-methylguanosine-3'-phosphate
  modified_base 18: mod_base = OTHER; note = 2'-fluorocytidine-3'-phosphate
  modified_base 19: mod_base = OTHER; note = 2'-O-methyluridine-3'-phosphate
  modified_base 20: mod_base = OTHER; note = 2'-fluorouridine-3'-phosphate
  modified_base 21: mod_base = OTHER; note = 2'-O-methylguanosine-3'-phosphorothioate
  modified_base 22: mod_base = OTHER; note = 2'-fluorocytidine-3'-phosphorothioate
  modified_base 23: mod_base = OTHER; note = 2'-O-methyluridine-3'-phosphate
aaaaagataaatgtctgcttgct

SEQ ID NO: 85 - RNA, 21 nt, synthetic construct
  source 1..21: mol_type = other RNA; note = Description of Artificial Sequence: Synthetic oligonucleotide
  modified_base 1: mod_base = OTHER; note = 2'-fluorocytidine-3'-phosphate
  modified_base 2: mod_base = OTHER; note = 2'-O-methyladenosine-3'-phosphate
  modified_base 3: mod_base = OTHER; note = 2'-fluoroadenosine-3'-phosphate
  modified_base 4: mod_base = OTHER; note = 2'-fluoroguanosine-3'-phosphate
  modified_base 5: mod_base = OTHER; note = 2'-fluorocytidine-3'-phosphate
  modified_base 6: mod_base = OTHER; note = 2'-O-methyladenosine-3'-phosphate
  modified_base 7: mod_base = OTHER; note = 2'-fluoroguanosine-3'-phosphate
  modified_base 8: mod_base = OTHER; note = 2'-O-methyladenosine-3'-phosphate
  modified_base 9: mod_base = OTHER; note = 2'-fluorocytidine-3'-phosphate
  modified_base 10: mod_base = OTHER; note = 2'-fluoroadenosine-3'-phosphate
  modified_base 11: mod_base = OTHER; note = 2'-fluorouridine-3'-phosphate
  modified_base 12: mod_base = OTHER; note = 2'-O-methyluridine-3'-phosphate
  modified_base 13: mod_base = OTHER; note = 2'-fluorouridine-3'-phosphate
  modified_base 14: mod_base = OTHER; note = 2'-fluoroadenosine-3'-phosphate
  modified_base 15: mod_base = OTHER; note = 2'-fluorouridine-3'-phosphate
  modified_base 16: mod_base = OTHER; note = 2'-fluorocytidine-3'-phosphate
  modified_base 17: mod_base = OTHER; note = 2'-fluorouridine-3'-phosphate
  modified_base 18: mod_base = OTHER; note = 2'-O-methyluridine-3'-phosphate
  modified_base 19: mod_base = OTHER; note = 2'-fluorouridine-3'-phosphate
  modified_base 20: mod_base = OTHER; note = 2'-O-methyluridine-3'-phosphate
  modified_base 21: mod_base = OTHER; note = 2'-fluorouridine-3'-phosphate N-[tris(GalNAc-alkyl)-amidodecanoyl)]-4-hydroxyprolinol Hyp-(GalNAc-alkyl)3
caagcagacatttatcttttt

SEQ ID NO: 86 - RNA, 23 nt, synthetic construct
  source 1..23: mol_type = other RNA; note = Description of Artificial Sequence: Synthetic oligonucleotide
  modified_base 1: mod_base = OTHER; note = 2'-O-methyladenosine-3'-phosphate
  modified_base 2: mod_base = OTHER; note = 2'-fluoroadenosine-3'-phosphate
  modified_base 3: mod_base = OTHER; note = 2'-O-methyladenosine-3'-phosphate
  modified_base 4: mod_base = OTHER; note = 2'-fluoroadenosine-3'-phosphate
  modified_base 5: mod_base = OTHER; note = 2'-O-methyladenosine-3'-phosphate
  modified_base 6: mod_base = OTHER; note = 2'-fluoroguanosine-3'-phosphate
  modified_base 7: mod_base = OTHER; note = 2'-O-methyladenosine-3'-phosphate
  modified_base 8: mod_base = OTHER; note = 2'-fluorouridine-3'-phosphate
  modified_base 9: mod_base = OTHER; note = 2'-O-methyladenosine-3'-phosphate
  modified_base 10: mod_base = OTHER; note = 2'-fluoroadenosine-3'-phosphate
  modified_base 11: mod_base = OTHER; note = 2'-O-methyladenosine-3'-phosphate
  modified_base 12: mod_base = OTHER; note = 2'-O-methyluridine-3'-phosphate
  modified_base 13: mod_base = OTHER; note = 2'-O-methylguanosine-3'-phosphate
  modified_base 14: mod_base = OTHER; note = 2'-fluorouridine-3'-phosphate
  modified_base 15: mod_base = OTHER; note = 2'-O-methylcytidine-3'-phosphate
  modified_base 16: mod_base = OTHER; note = 2'-fluorouridine-3'-phosphate
  modified_base 17: mod_base = OTHER; note = 2'-O-methylguanosine-3'-phosphate
  modified_base 18: mod_base = OTHER; note = 2'-fluorocytidine-3'-phosphate
  modified_base 19: mod_base = OTHER; note = 2'-O-methyluridine-3'-phosphate
  modified_base 20: mod_base = OTHER; note = 2'-fluorouridine-3'-phosphate
  modified_base 21: mod_base = OTHER; note = 2'-O-methylguanosine-3'-phosphorothioate
  modified_base 22: mod_base = OTHER; note = 2'-fluorocytidine-3'-phosphorothioate
  modified_base 23: mod_base = OTHER; note = 2'-O-methyluridine-3'-phosphate
aaaaagataaatgtctgcttgct

SEQ ID NO: 87 - RNA, 21 nt, synthetic construct
  source 1..21: mol_type = other RNA; note = Description of Artificial Sequence: Synthetic oligonucleotide
  modified_base 1: mod_base = OTHER; note = 2'-fluorocytidine-3'-phosphate
  modified_base 2: mod_base = OTHER; note = 2'-O-methyladenosine-3'-phosphate
  modified_base 3: mod_base = OTHER; note = 2'-fluoroadenosine-3'-phosphate
  modified_base 4: mod_base = OTHER; note = 2'-fluoroguanosine-3'-phosphate
  modified_base 5: mod_base = OTHER; note = 2'-fluorocytidine-3'-phosphate
  modified_base 6: mod_base = OTHER; note = 2'-fluoroadenosine-3'-phosphate
  modified_base 7: mod_base = OTHER; note = 2'-fluoroguanosine-3'-phosphate
  modified_base 8: mod_base = OTHER; note = 2'-O-methyladenosine-3'-phosphate
  modified_base 9: mod_base = OTHER; note = 2'-fluorocytidine-3'-phosphate
  modified_base 10: mod_base = OTHER; note = 2'-fluoroadenosine-3'-phosphate
  modified_base 11: mod_base = OTHER; note = 2'-fluorouridine-3'-phosphate
  modified_base 12: mod_base = OTHER; note = 2'-O-methyluridine-3'-phosphate
  modified_base 13: mod_base = OTHER; note = 2'-fluorouridine-3'-phosphate
  modified_base 14: mod_base = OTHER; note = 2'-fluoroadenosine-3'-phosphate
  modified_base 15: mod_base = OTHER; note = 2'-fluorouridine-3'-phosphate
  modified_base 16: mod_base = OTHER; note = 2'-fluorocytidine-3'-phosphate
  modified_base 17: mod_base = OTHER; note = 2'-fluorouridine-3'-phosphate
  modified_base 18: mod_base = OTHER; note = 2'-O-methyluridine-3'-phosphate
  modified_base 19: mod_base = OTHER; note = 2'-fluorouridine-3'-phosphate
  modified_base 20: mod_base = OTHER; note = 2'-O-methyluridine-3'-phosphate
  modified_base 21: mod_base = OTHER; note = 2'-fluorouridine-3'-phosphate N-[tris(GalNAc-alkyl)-amidodecanoyl)]-4-hydroxyprolinol Hyp-(GalNAc-alkyl)3
caagcagacatttatcttttt

SEQ ID NO: 88 - RNA, 23 nt, synthetic construct
  source 1..23: mol_type = other RNA; note = Description of Artificial Sequence: Synthetic oligonucleotide
  modified_base 1: mod_base = OTHER; note = 2'-O-methyladenosine-3'-phosphate
  modified_base 2: mod_base = OTHER; note = 2'-fluoroadenosine-3'-phosphate
  modified_base 3: mod_base = OTHER; note = 2'-O-methyladenosine-3'-phosphate
  modified_base 4: mod_base = OTHER; note = 2'-fluoroadenosine-3'-phosphate
  modified_base 5: mod_base = OTHER; note = 2'-O-methyladenosine-3'-phosphate
  modified_base 6: mod_base = OTHER; note = 2'-fluoroguanosine-3'-phosphate
  modified_base 7: mod_base = OTHER; note = 2'-O-methyladenosine-3'-phosphate
  modified_base 8: mod_base = OTHER; note = 2'-fluorouridine-3'-phosphate
  modified_base 9: mod_base = OTHER; note = 2'-O-methyladenosine-3'-phosphate
  modified_base 10: mod_base = OTHER; note = 2'-fluoroadenosine-3'-phosphate
  modified_base 11: mod_base = OTHER; note = 2'-O-methyladenosine-3'-phosphate
  modified_base 12: mod_base = OTHER; note = 2'-O-methyluridine-3'-phosphate
  modified_base 13: mod_base = OTHER; note = 2'-O-methylguanosine-3'-phosphate
  modified_base 14: mod_base = OTHER; note = 2'-fluorouridine-3'-phosphate
  modified_base 15: mod_base = OTHER; note = 2'-O-methylcytidine-3'-phosphate
  modified_base 16: mod_base = OTHER; note = 2'-fluorouridine-3'-phosphate
  modified_base 17: mod_base = OTHER; note = 2'-O-methylguanosine-3'-phosphate
  modified_base 18: mod_base = OTHER; note = 2'-fluorocytidine-3'-phosphate
  modified_base 19: mod_base = OTHER; note = 2'-O-methyluridine-3'-phosphate
  modified_base 20: mod_base = OTHER; note = 2'-fluorouridine-3'-phosphate
  modified_base 21: mod_base = OTHER; note = 2'-O-methylguanosine-3'-phosphorothioate
  modified_base 22: mod_base = OTHER; note = 2'-fluorocytidine-3'-phosphorothioate
  modified_base 23: mod_base = OTHER; note = 2'-O-methyluridine-3'-phosphate
aaaaagataaatgtctgcttgct

SEQ ID NO: 89 - RNA, 21 nt, synthetic construct
  source 1..21: mol_type = other RNA; note = Description of Artificial Sequence: Synthetic oligonucleotide
  modified_base 1: mod_base = OTHER; note = 2'-fluorocytidine-3'-phosphate
  modified_base 2: mod_base = OTHER; note = 2'-O-methyladenosine-3'-phosphate
  modified_base 3: mod_base = OTHER; note = 2'-fluoroadenosine-3'-phosphate
  modified_base 4: mod_base = OTHER; note = 2'-fluoroguanosine-3'-phosphate
  modified_base 5: mod_base = OTHER; note = 2'-fluorocytidine-3'-phosphate
  modified_base 6: mod_base = OTHER; note = 2'-fluoroadenosine-3'-phosphate
  modified_base 7: mod_base = OTHER; note = 2'-fluoroguanosine-3'-phosphate
  modified_base 8: mod_base = OTHER; note = 2'-O-methyladenosine-3'-phosphate
  modified_base 9: mod_base = OTHER; note = 2'-fluorocytidine-3'-phosphate
  modified_base 10: mod_base = OTHER; note = 2'-fluoroadenosine-3'-phosphate
  modified_base 11: mod_base = OTHER; note = 2'-fluorouridine-3'-phosphate
  modified_base 12: mod_base = OTHER; note = 2'-O-methyluridine-3'-phosphate
  modified_base 13: mod_base = OTHER; note = 2'-fluorouridine-3'-phosphate
  modified_base 14: mod_base = OTHER; note = 2'-fluoroadenosine-3'-phosphate
  modified_base 15: mod_base = OTHER; note = 2'-fluorouridine-3'-phosphate
  modified_base 16: mod_base = OTHER; note = 2'-fluorocytidine-3'-phosphate
  modified_base 17: mod_base = OTHER; note = 2'-fluorouridine-3'-phosphate
  modified_base 18: mod_base = OTHER; note = 2'-O-methyluridine-3'-phosphate
  modified_base 19: mod_base = OTHER; note = 2'-fluorouridine-3'-phosphate
  modified_base 20: mod_base = OTHER; note = 2'-O-methyluridine-3'-phosphate
  modified_base 21: mod_base = OTHER; note = 2'-fluorouridine-3'-phosphate N-[tris(GalNAc-alkyl)-amidodecanoyl)]-4-hydroxyprolinol Hyp-(GalNAc-alkyl)3
caagcagacatttatcttttt

SEQ ID NO: 90 - RNA, 23 nt, synthetic construct
  source 1..23: mol_type = other RNA; note = Description of Artificial Sequence: Synthetic oligonucleotide
  modified_base 1: mod_base = OTHER; note = 2'-O-methyladenosine-3'-phosphate
  modified_base 2: mod_base = OTHER; note = 2'-fluoroadenosine-3'-phosphate
  modified_base 3: mod_base = OTHER; note = 2'-O-methyladenosine-3'-phosphate
  modified_base 4: mod_base = OTHER; note = 2'-fluoroadenosine-3'-phosphate
  modified_base 5: mod_base = OTHER; note = 2'-O-methyladenosine-3'-phosphate
  modified_base 6: mod_base = OTHER; note = 2'-fluoroguanosine-3'-phosphate
  modified_base 7: mod_base = OTHER; note = 2'-O-methyladenosine-3'-phosphate
  modified_base 8: mod_base = OTHER; note = 2'-fluorouridine-3'-phosphate
  modified_base 9: mod_base = OTHER; note = 2'-O-methyladenosine-3'-phosphate
  modified_base 10: mod_base = OTHER; note = 2'-fluoroadenosine-3'-phosphate
  modified_base 11: mod_base = OTHER; note = 2'-O-methyladenosine-3'-phosphate
  modified_base 12: mod_base = OTHER; note = 2'-O-methyluridine-3'-phosphate
  modified_base 13: mod_base = OTHER; note = 2'-O-methylguanosine-3'-phosphate
  modified_base 14: mod_base = OTHER; note = 2'-fluorouridine-3'-phosphate
  modified_base 15: mod_base = OTHER; note = 2'-O-methylcytidine-3'-phosphate
  modified_base 16: mod_base = OTHER; note = 2'-fluorouridine-3'-phosphate
  modified_base 17: mod_base = OTHER; note = 2'-O-methylguanosine-3'-phosphate
  modified_base 18: mod_base = OTHER; note = 2'-fluorocytidine-3'-phosphate
  modified_base 19: mod_base = OTHER; note = 2'-O-methyluridine-3'-phosphate
  modified_base 20: mod_base = OTHER; note = 2'-fluorouridine-3'-phosphate
  modified_base 21: mod_base = OTHER; note = 2'-O-methylguanosine-3'-phosphorothioate
  modified_base 22: mod_base = OTHER; note = 2'-fluorocytidine-3'-phosphorothioate
  modified_base 23: mod_base = OTHER; note = 2'-O-methyluridine-3'-phosphate
aaaaagataaatgtctgcttgct

SEQ ID NO: 91 - RNA, 21 nt, synthetic construct
  source 1..21: mol_type = other RNA; note = Description of Artificial Sequence: Synthetic oligonucleotide
  modified_base 1: mod_base = OTHER; note = 2'-fluorocytidine-3'-phosphate
  modified_base 2: mod_base = OTHER; note = 2'-O-methyladenosine-3'-phosphate
  modified_base 3: mod_base = OTHER; note = 2'-fluoroadenosine-3'-phosphate
  modified_base 4: mod_base = OTHER; note = 2'-fluoroguanosine-3'-phosphate
  modified_base 5: mod_base = OTHER; note = 2'-fluorocytidine-3'-phosphate
  modified_base 6: mod_base = OTHER; note = 2'-fluoroadenosine-3'-phosphate
  modified_base 7: mod_base = OTHER; note = 2'-fluoroguanosine-3'-phosphate
  modified_base 8: mod_base = OTHER; note = 2'-O-methyladenosine-3'-phosphate
  modified_base 9: mod_base = OTHER; note = 2'-fluorocytidine-3'-phosphate
  modified_base 10: mod_base = OTHER; note = 2'-fluoroadenosine-3'-phosphate
  modified_base 11: mod_base = OTHER; note = 2'-fluorouridine-3'-phosphate
  modified_base 12: mod_base = OTHER; note = 2'-O-methyluridine-3'-phosphate
  modified_base 13: mod_base = OTHER; note = 2'-fluorouridine-3'-phosphate
  modified_base 14: mod_base = OTHER; note = 2'-fluoroadenosine-3'-phosphate
  modified_base 15: mod_base = OTHER; note = 2'-fluorouridine-3'-phosphate
  modified_base 16: mod_base = OTHER; note = 2'-fluorocytidine-3'-phosphate
  modified_base 17: mod_base = OTHER; note = 2'-fluorouridine-3'-phosphate
  modified_base 18: mod_base = OTHER; note = 2'-O-methyluridine-3'-phosphate
  modified_base 19: mod_base = OTHER; note = 2'-fluorouridine-3'-phosphate
  modified_base 20: mod_base = OTHER; note = 2'-O-methyluridine-3'-phosphate
  modified_base 21: mod_base = OTHER; note = 2'-fluorouridine-3'-phosphate N-[tris(GalNAc-alkyl)-amidodecanoyl)]-4-hydroxyprolinol Hyp-(GalNAc-alkyl)3
caagcagacatttatcttttt

SEQ ID NO: 92 - RNA, 23 nt, synthetic construct
  source 1..23: mol_type = other RNA; note = Description of Artificial Sequence: Synthetic oligonucleotide
  modified_base 1: mod_base = OTHER; note = 2'-O-methyladenosine-3'-phosphate
  modified_base 2: mod_base = OTHER; note = 2'-fluoroadenosine-3'-phosphate
  modified_base 3: mod_base = OTHER; note = 2'-O-methyladenosine-3'-phosphate
  modified_base 4: mod_base = OTHER; note = 2'-fluoroadenosine-3'-phosphate
  modified_base 5: mod_base = OTHER; note = 2'-O-methyladenosine-3'-phosphate
  modified_base 6: mod_base = OTHER; note = 2'-fluoroguanosine-3'-phosphate
  modified_base 7: mod_base = OTHER; note = 2'-O-methyladenosine-3'-phosphate
  modified_base 8: mod_base = OTHER; note = 2'-fluorouridine-3'-phosphate
  modified_base 9: mod_base = OTHER; note = 2'-O-methyladenosine-3'-phosphate
  modified_base 10: mod_base = OTHER; note = 2'-fluoroadenosine-3'-phosphate
  modified_base 11: mod_base = OTHER; note = 2'-O-methyladenosine-3'-phosphate
  modified_base 12: mod_base = OTHER; note = 2'-O-methyluridine-3'-phosphate
  modified_base 13: mod_base = OTHER; note = 2'-O-methylguanosine-3'-phosphate
  modified_base 14: mod_base = OTHER; note = 2'-fluorouridine-3'-phosphate
  modified_base 15: mod_base = OTHER; note = 2'-O-methylcytidine-3'-phosphate
  modified_base 16: mod_base = OTHER; note = 2'-fluorouridine-3'-phosphate
  modified_base 17: mod_base = OTHER; note = 2'-O-methylguanosine-3'-phosphate
  modified_base 18: mod_base = OTHER; note = 2'-fluorocytidine-3'-phosphate
  modified_base 19: mod_base = OTHER; note = 2'-O-methyluridine-3'-phosphate
  modified_base 20: mod_base = OTHER; note = 2'-fluorouridine-3'-phosphate
  modified_base 21: mod_base = OTHER; note = 2'-O-methylguanosine-3'-phosphorothioate
  modified_base 22: mod_base = OTHER; note = 2'-fluorocytidine-3'-phosphorothioate
  modified_base 23: mod_base = OTHER; note = 2'-O-methyluridine-3'-phosphate
aaaaagataaatgtctgcttgct

SEQ ID NO: 93 - RNA, 21 nt, synthetic construct
  source 1..21: mol_type = other RNA; note = Description of Artificial Sequence: Synthetic oligonucleotide
  modified_base 1: mod_base = OTHER; note = 2'-fluorocytidine-3'-phosphate
  modified_base 2: mod_base = OTHER; note = 2'-O-methyladenosine-3'-phosphate
  modified_base 3: mod_base = OTHER; note = 2'-fluoroadenosine-3'-phosphate
  modified_base 4: mod_base = OTHER; note = 2'-O-methylguanosine-3'-phosphate
  modified_base 5: mod_base = OTHER; note = 2'-O-methylcytidine-3'-phosphate
  modified_base 6: mod_base = OTHER; note = 2'-O-methyladenosine-3'-phosphate
  modified_base 7: mod_base = OTHER; note = 2'-fluoroguanosine-3'-phosphate
  modified_base 8: mod_base = OTHER; note = 2'-O-methyladenosine-3'-phosphate
  modified_base 9: mod_base = OTHER; note = 2'-fluorocytidine-3'-phosphate
  modified_base 10: mod_base = OTHER; note = 2'-fluoroadenosine-3'-phosphate
  modified_base 11: mod_base = OTHER; note = 2'-fluorouridine-3'-phosphate
  modified_base 12: mod_base = OTHER; note = 2'-O-methyluridine-3'-phosphate
  modified_base 13: mod_base = OTHER; note = 2'-fluorouridine-3'-phosphate
  modified_base 14: mod_base = OTHER; note = 2'-O-methyladenosine-3'-phosphate
  modified_base 15: mod_base = OTHER; note = 2'-fluorouridine-3'-phosphate
  modified_base 16: mod_base = OTHER; note = 2'-O-methylcytidine-3'-phosphate
  modified_base 17: mod_base = OTHER; note = 2'-fluorouridine-3'-phosphate
  modified_base 18: mod_base = OTHER; note = 2'-O-methyluridine-3'-phosphate
  modified_base 19: mod_base = OTHER; note = 2'-fluorouridine-3'-phosphate
  modified_base 20: mod_base = OTHER; note = 2'-O-methyluridine-3'-phosphate
  modified_base 21: mod_base = OTHER; note = 2'-fluorouridine-3'-phosphate N-[tris(GalNAc-alkyl)-amidodecanoyl)]-4-hydroxyprolinol Hyp-(GalNAc-alkyl)3
caagcagacatttatcttttt

SEQ ID NO: 94 - RNA, 23 nt, synthetic construct
  source 1..23: mol_type = other RNA; note = Description of Artificial Sequence: Synthetic oligonucleotide
  modified_base 1: mod_base = OTHER; note = 2'-O-methyladenosine-3'-phosphate
  modified_base 2: mod_base = OTHER; note = 2'-fluoroadenosine-3'-phosphate
  modified_base 3: mod_base = OTHER; note = 2'-O-methyladenosine-3'-phosphate
  modified_base 4: mod_base = OTHER; note = 2'-fluoroadenosine-3'-phosphate
  modified_base 5: mod_base = OTHER; note = 2'-O-methyladenosine-3'-phosphate
  modified_base 6: mod_base = OTHER; note = 2'-fluoroguanosine-3'-phosphate
  modified_base 7: mod_base = OTHER; note = 2'-O-methyladenosine-3'-phosphate
  modified_base 8: mod_base = OTHER; note = 2'-fluorouridine-3'-phosphate
  modified_base 9: mod_base = OTHER; note = 2'-O-methyladenosine-3'-phosphate
  modified_base 10: mod_base = OTHER; note = 2'-fluoroadenosine-3'-phosphate
  modified_base 11: mod_base = OTHER; note = 2'-O-methyladenosine-3'-phosphate
  modified_base 12: mod_base = OTHER; note = 2'-O-methyluridine-3'-phosphate
  modified_base 13: mod_base = OTHER; note = 2'-O-methylguanosine-3'-phosphate
  modified_base 14: mod_base = OTHER; note = 2'-fluorouridine-3'-phosphate
  modified_base 15: mod_base = OTHER; note = 2'-O-methylcytidine-3'-phosphate
  modified_base 16: mod_base = OTHER; note = 2'-fluorouridine-3'-phosphate
  modified_base 17: mod_base = OTHER; note = 2'-O-methylguanosine-3'-phosphate
  modified_base 18: mod_base = OTHER; note = 2'-fluorocytidine-3'-phosphate
  modified_base 19: mod_base = OTHER; note = 2'-O-methyluridine-3'-phosphate
  modified_base 20: mod_base = OTHER; note = 2'-fluorouridine-3'-phosphate
  modified_base 21: mod_base = OTHER; note = 2'-O-methylguanosine-3'-phosphorothioate
  modified_base 22: mod_base = OTHER; note = 2'-fluorocytidine-3'-phosphorothioate
  modified_base 23: mod_base = OTHER; note = 2'-O-methyluridine-3'-phosphate
aaaaagataaatgtctgcttgct

SEQ ID NO: 95 - RNA, 21 nt, synthetic construct
  source 1..21: mol_type = other RNA; note = Description of Artificial Sequence: Synthetic oligonucleotide
  modified_base 1: mod_base = OTHER; note = 2'-fluorocytidine-3'-phosphate
  modified_base 2: mod_base = OTHER; note = 2'-O-methyladenosine-3'-phosphate
  modified_base 3: mod_base = OTHER; note = 2'-fluoroadenosine-3'-phosphate
  modified_base 4: mod_base = OTHER; note = 2'-O-methylguanosine-3'-phosphate
  modified_base 5: mod_base = OTHER; note = 2'-O-methylcytidine-3'-phosphate
  modified_base 6: mod_base = OTHER; note = 2'-O-methyladenosine-3'-phosphate
  modified_base 7: mod_base = OTHER; note = 2'-fluoroguanosine-3'-phosphate
  modified_base 8: mod_base = OTHER; note = 2'-O-methyladenosine-3'-phosphate
  modified_base 9: mod_base = OTHER; note = 2'-fluorocytidine-3'-phosphate
  modified_base 10: mod_base = OTHER; note = 2'-fluoroadenosine-3'-phosphate
  modified_base 11: mod_base = OTHER; note = 2'-fluorouridine-3'-phosphate
  modified_base 12: mod_base = OTHER; note = 2'-O-methyluridine-3'-phosphate
  modified_base 13: mod_base = OTHER; note = 2'-fluorouridine-3'-phosphate
  modified_base 14: mod_base = OTHER; note = 2'-O-methyladenosine-3'-phosphate
  modified_base 15: mod_base = OTHER; note = 2'-fluorouridine-3'-phosphate
  modified_base 16: mod_base = OTHER; note = 2'-O-methylcytidine-3'-phosphate
  modified_base 17: mod_base = OTHER; note = 2'-fluorouridine-3'-phosphate
  modified_base 18: mod_base = OTHER; note = 2'-O-methyluridine-3'-phosphate
  modified_base 19: mod_base = OTHER; note = 2'-fluorouridine-3'-phosphate
  modified_base 20: mod_base = OTHER; note = 2'-O-methyluridine-3'-phosphate
  modified_base 21: mod_base = OTHER; note = 2'-fluorouridine-3'-phosphate N-[tris(GalNAc-alkyl)-amidodecanoyl)]-4-hydroxyprolinol Hyp-(GalNAc-alkyl)3
caagcagacatttatcttttt

SEQ ID NO: 96 - RNA, 23 nt, synthetic construct
  source 1..23: mol_type = other RNA; note = Description of Artificial Sequence: Synthetic oligonucleotide
  modified_base 1: mod_base = OTHER; note = 2'-O-methyladenosine-3'-phosphate
  modified_base 2: mod_base = OTHER; note = 2'-fluoroadenosine-3'-phosphate
  modified_base 3: mod_base = OTHER; note = 2'-O-methyladenosine-3'-phosphate
  modified_base 4: mod_base = OTHER; note = 2'-fluoroadenosine-3'-phosphate
  modified_base 5: mod_base = OTHER; note = 2'-O-methyladenosine-3'-phosphate
  modified_base 6: mod_base = OTHER; note = 2'-fluoroguanosine-3'-phosphate
  modified_base 7: mod_base = OTHER; note = 2'-O-methyladenosine-3'-phosphate
  modified_base 8: mod_base = OTHER; note = 2'-fluorouridine-3'-phosphate
  modified_base 9: mod_base = OTHER; note = 2'-O-methyladenosine-3'-phosphate
  modified_base 10: mod_base = OTHER; note = 2'-fluoroadenosine-3'-phosphate
  modified_base 11: mod_base = OTHER; note = 2'-O-methyladenosine-3'-phosphate
  modified_base 12: mod_base = OTHER; note = 2'-O-methyluridine-3'-phosphate
  modified_base 13: mod_base = OTHER; note = 2'-O-methylguanosine-3'-phosphate
  modified_base 14: mod_base = OTHER; note = 2'-fluorouridine-3'-phosphate
  modified_base 15: mod_base = OTHER; note = 2'-O-methylcytidine-3'-phosphate
  modified_base 16: mod_base = OTHER; note = 2'-fluorouridine-3'-phosphate
  modified_base 17: mod_base = OTHER; note = 2'-O-methylguanosine-3'-phosphate
  modified_base 18: mod_base = OTHER; note = 2'-fluorocytidine-3'-phosphate
  modified_base 19: mod_base = OTHER; note = 2'-O-methyluridine-3'-phosphate
  modified_base 20: mod_base = OTHER; note = 2'-fluorouridine-3'-phosphate
  modified_base 21: mod_base = OTHER; note = 2'-O-methylguanosine-3'-phosphorothioate
  modified_base 22: mod_base = OTHER; note = 2'-fluorocytidine-3'-phosphorothioate
  modified_base 23: mod_base = OTHER; note = 2'-O-methyluridine-3'-phosphate
aaaaagataaatgtctgcttgct

SEQ ID NO: 97 - RNA, 21 nt, synthetic construct
  source 1..21: mol_type = other RNA; note = Description of Artificial Sequence: Synthetic oligonucleotide
  modified_base 1: mod_base = OTHER; note = 2'-fluorocytidine-3'-phosphate
  modified_base 2: mod_base = OTHER; note = 2'-O-methyladenosine-3'-phosphate
  modified_base 3: mod_base = OTHER; note = 2'-fluoroadenosine-3'-phosphate
  modified_base 4: mod_base = OTHER; note = 2'-O-methylguanosine-3'-phosphate
  modified_base 5: mod_base = OTHER; note = 2'-fluorocytidine-3'-phosphate
  modified_base 6: mod_base = OTHER; note = 2'-O-methyladenosine-3'-phosphate
  modified_base 7: mod_base = OTHER; note = 2'-O-methylguanosine-3'-phosphate
  modified_base 8: mod_base = OTHER; note = 2'-O-methyladenosine-3'-phosphate
  modified_base 9: mod_base = OTHER; note = 2'-fluorocytidine-3'-phosphate
  modified_base 10: mod_base = OTHER; note = 2'-fluoroadenosine-3'-phosphate
  modified_base 11: mod_base = OTHER; note = 2'-fluorouridine-3'-phosphate
  modified_base 12: mod_base = OTHER; note = 2'-O-methyluridine-3'-phosphate
  modified_base 13: mod_base = OTHER; note = 2'-fluorouridine-3'-phosphate
  modified_base 14: mod_base = OTHER; note = 2'-O-methyladenosine-3'-phosphate
  modified_base 15: mod_base = OTHER; note = 2'-fluorouridine-3'-phosphate
  modified_base 16: mod_base = OTHER; note = 2'-O-methylcytidine-3'-phosphate
  modified_base 17: mod_base = OTHER; note = 2'-fluorouridine-3'-phosphate
  modified_base 18: mod_base = OTHER; note = 2'-O-methyluridine-3'-phosphate
  modified_base 19: mod_base = OTHER; note = 2'-fluorouridine-3'-phosphate
  modified_base 20: mod_base = OTHER; note = 2'-O-methyluridine-3'-phosphate
  modified_base 21: mod_base = OTHER; note = 2'-fluorouridine-3'-phosphate N-[tris(GalNAc-alkyl)-amidodecanoyl)]-4-hydroxyprolinol Hyp-(GalNAc-alkyl)3
caagcagacatttatcttttt

SEQ ID NO: 98 - RNA, 23 nt, synthetic construct
  source 1..23: mol_type = other RNA; note = Description of Artificial Sequence: Synthetic oligonucleotide
  modified_base 1: mod_base = OTHER; note = 2'-O-methyladenosine-3'-phosphate
  modified_base 2: mod_base = OTHER; note = 2'-fluoroadenosine-3'-phosphate
  modified_base 3: mod_base = OTHER; note = 2'-O-methyladenosine-3'-phosphate
  modified_base 4: mod_base = OTHER; note = 2'-fluoroadenosine-3'-phosphate
  modified_base 5: mod_base = OTHER; note = 2'-O-methyladenosine-3'-phosphate
  modified_base 6: mod_base = OTHER; note = 2'-fluoroguanosine-3'-phosphate
  modified_base 7: mod_base = OTHER; note = 2'-O-methyladenosine-3'-phosphate
  modified_base 8: mod_base = OTHER; note = 2'-fluorouridine-3'-phosphate
  modified_base 9: mod_base = OTHER; note = 2'-O-methyladenosine-3'-phosphate
  modified_base 10: mod_base = OTHER; note = 2'-fluoroadenosine-3'-phosphate
  modified_base 11: mod_base = OTHER; note = 2'-O-methyladenosine-3'-phosphate
  modified_base 12: mod_base = OTHER; note = 2'-O-methyluridine-3'-phosphate
  modified_base 13: mod_base = OTHER; note = 2'-O-methylguanosine-3'-phosphate
  modified_base 14: mod_base = OTHER; note = 2'-fluorouridine-3'-phosphate
  modified_base 15: mod_base = OTHER; note = 2'-O-methylcytidine-3'-phosphate
  modified_base 16: mod_base = OTHER; note = 2'-fluorouridine-3'-phosphate
  modified_base 17: mod_base = OTHER; note = 2'-O-methylguanosine-3'-phosphate
  modified_base 18: mod_base = OTHER; note = 2'-fluorocytidine-3'-phosphate
  modified_base 19: mod_base = OTHER; note = 2'-O-methyluridine-3'-phosphate
  modified_base 20: mod_base = OTHER; note = 2'-fluorouridine-3'-phosphate
  modified_base 21: mod_base = OTHER; note = 2'-O-methylguanosine-3'-phosphorothioate
  modified_base 22: mod_base = OTHER; note = 2'-fluorocytidine-3'-phosphorothioate
  modified_base 23: mod_base = OTHER; note = 2'-O-methyluridine-3'-phosphate
aaaaagataaatgtctgcttgct

SEQ ID NO: 99 - RNA, 21 nt, synthetic construct
  source 1..21: mol_type = other RNA; note = Description of Artificial Sequence: Synthetic oligonucleotide
  modified_base 1: mod_base = OTHER; note = 2'-fluorocytidine-3'-phosphate
  modified_base 2: mod_base = OTHER; note = 2'-O-methyladenosine-3'-phosphate
  modified_base 3: mod_base = OTHER; note = 2'-fluoroadenosine-3'-phosphate
  modified_base 4: mod_base = OTHER; note = 2'-O-methylguanosine-3'-phosphate
  modified_base 5: mod_base = OTHER; note = 2'-fluorocytidine-3'-phosphate
  modified_base 6: mod_base = OTHER; note = 2'-O-methyladenosine-3'-phosphate
  modified_base 7: mod_base = OTHER; note = 2'-O-methylguanosine-3'-phosphate
  modified_base 8: mod_base = OTHER; note = 2'-O-methyladenosine-3'-phosphate
  modified_base 9: mod_base = OTHER; note = 2'-fluorocytidine-3'-phosphate
  modified_base 10: mod_base = OTHER; note = 2'-fluoroadenosine-3'-phosphate
  modified_base 11: mod_base = OTHER; note = 2'-fluorouridine-3'-phosphate
  modified_base 12: mod_base = OTHER; note = 2'-O-methyluridine-3'-phosphate
  modified_base 13: mod_base = OTHER; note = 2'-fluorouridine-3'-phosphate
  modified_base 14: mod_base = OTHER; note = 2'-O-methyladenosine-3'-phosphate
  modified_base 15: mod_base = OTHER; note = 2'-fluorouridine-3'-phosphate
  modified_base 16: mod_base = OTHER; note = 2'-O-methylcytidine-3'-phosphate
  modified_base 17: mod_base = OTHER; note = 2'-fluorouridine-3'-phosphate
  modified_base 18: mod_base = OTHER; note = 2'-O-methyluridine-3'-phosphate
  modified_base 19: mod_base = OTHER; note = 2'-fluorouridine-3'-phosphate
  modified_base 20: mod_base = OTHER; note = 2'-O-methyluridine-3'-phosphate
  modified_base 21: mod_base = OTHER; note = 2'-fluorouridine-3'-phosphate N-[tris(GalNAc-alkyl)-amidodecanoyl)]-4-hydroxyprolinol Hyp-(GalNAc-alkyl)3
caagcagacatttatcttttt

SEQ ID NO: 100 - RNA, 23 nt, synthetic construct
  source 1..23: mol_type = other RNA; note = Description of Artificial Sequence: Synthetic oligonucleotide
  modified_base 1: mod_base = OTHER; note = 2'-O-methyladenosine-3'-phosphate
  modified_base 2: mod_base = OTHER; note = 2'-fluoroadenosine-3'-phosphate
  modified_base 3: mod_base = OTHER; note = 2'-O-methyladenosine-3'-phosphate
  modified_base 4: mod_base = OTHER; note = 2'-fluoroadenosine-3'-phosphate
  modified_base 5: mod_base = OTHER; note = 2'-O-methyladenosine-3'-phosphate
  modified_base 6: mod_base = OTHER; note = 2'-fluoroguanosine-3'-phosphate
  modified_base 7: mod_base = OTHER; note = 2'-O-methyladenosine-3'-phosphate
  modified_base 8: mod_base = OTHER; note = 2'-fluorouridine-3'-phosphate
  modified_base 9: mod_base = OTHER; note = 2'-O-methyladenosine-3'-phosphate
  modified_base 10: mod_base = OTHER; note = 2'-fluoroadenosine-3'-phosphate
  modified_base 11: mod_base = OTHER; note = 2'-O-methyladenosine-3'-phosphate
  modified_base 12: mod_base = OTHER; note = 2'-O-methyluridine-3'-phosphate
  modified_base 13: mod_base = OTHER; note = 2'-O-methylguanosine-3'-phosphate
  modified_base 14: mod_base = OTHER; note = 2'-fluorouridine-3'-phosphate
  modified_base 15: mod_base = OTHER; note = 2'-O-methylcytidine-3'-phosphate
  modified_base 16: mod_base = OTHER; note = 2'-fluorouridine-3'-phosphate
  modified_base 17: mod_base = OTHER; note = 2'-O-methylguanosine-3'-phosphate
  modified_base 18: mod_base = OTHER; note = 2'-fluorocytidine-3'-phosphate
  modified_base 19: mod_base = OTHER; note = 2'-O-methyluridine-3'-phosphate
  modified_base 20: mod_base = OTHER; note = 2'-fluorouridine-3'-phosphate
  modified_base 21: mod_base = OTHER; note = 2'-O-methylguanosine-3'-phosphorothioate
  modified_base 22: mod_base = OTHER; note = 2'-fluorocytidine-3'-phosphorothioate
  modified_base 23: mod_base = OTHER; note = 2'-O-methyluridine-3'-phosphate
aaaaagataaatgtctgcttgct

SEQ ID NO: 101 - RNA, 21 nt, synthetic construct
  source 1..21: mol_type = other RNA; note = Description of Artificial Sequence: Synthetic oligonucleotide
  modified_base 1: mod_base = OTHER; note = 2'-fluorocytidine-3'-phosphate
  modified_base 2: mod_base = OTHER; note = 2'-O-methyladenosine-3'-phosphate
  modified_base 3: mod_base = OTHER; note = 2'-fluoroadenosine-3'-phosphate
  modified_base 4: mod_base = OTHER; note = 2'-O-methylguanosine-3'-phosphate
  modified_base 5: mod_base = OTHER; note = 2'-fluorocytidine-3'-phosphate
  modified_base 6: mod_base = OTHER; note = 2'-O-methyladenosine-3'-phosphate
  modified_base 7: mod_base = OTHER; note = 2'-fluoroguanosine-3'-phosphate
  modified_base 8: mod_base = OTHER; note = 2'-O-methyladenosine-3'-phosphate
  modified_base 9: mod_base = OTHER; note = 2'-O-methylcytidine-3'-phosphate
  modified_base 10: mod_base = OTHER; note = 2'-fluoroadenosine-3'-phosphate
  modified_base 11: mod_base = OTHER; note = 2'-fluorouridine-3'-phosphate
  modified_base 12: mod_base = OTHER; note = 2'-O-methyluridine-3'-phosphate
  modified_base 13: mod_base = OTHER; note = 2'-fluorouridine-3'-phosphate
  modified_base 14: mod_base = OTHER; note = 2'-O-methyladenosine-3'-phosphate
  modified_base 15: mod_base = OTHER; note = 2'-fluorouridine-3'-phosphate
  modified_base 16: mod_base = OTHER; note = 2'-O-methylcytidine-3'-phosphate
  modified_base 17: mod_base = OTHER; note = 2'-fluorouridine-3'-phosphate
  modified_base 18: mod_base = OTHER; note = 2'-O-methyluridine-3'-phosphate
  modified_base 19: mod_base = OTHER; note = 2'-fluorouridine-3'-phosphate
  modified_base 20: mod_base = OTHER; note = 2'-O-methyluridine-3'-phosphate
  modified_base 21: mod_base = OTHER; note = 2'-fluorouridine-3'-phosphate N-[tris(GalNAc-alkyl)-amidodecanoyl)]-4-hydroxyprolinol Hyp-(GalNAc-alkyl)3
caagcagacatttatcttttt

SEQ ID NO: 102 - RNA, 23 nt, synthetic construct
  source 1..23: mol_type = other RNA; note = Description of Artificial Sequence: Synthetic oligonucleotide
  modified_base 1: mod_base = OTHER; note = 2'-O-methyladenosine-3'-phosphate
  modified_base 2: mod_base = OTHER; note = 2'-fluoroadenosine-3'-phosphate
  modified_base 3: mod_base = OTHER; note = 2'-O-methyladenosine-3'-phosphate
  modified_base 4: mod_base = OTHER; note = 2'-fluoroadenosine-3'-phosphate
  modified_base 5: mod_base = OTHER; note = 2'-O-methyladenosine-3'-phosphate
  modified_base 6: mod_base = OTHER; note = 2'-fluoroguanosine-3'-phosphate
  modified_base 7: mod_base = OTHER; note = 2'-O-methyladenosine-3'-phosphate
  modified_base 8: mod_base = OTHER; note = 2'-fluorouridine-3'-phosphate
  modified_base 9: mod_base = OTHER; note = 2'-O-methyladenosine-3'-phosphate
  modified_base 10: mod_base = OTHER; note = 2'-fluoroadenosine-3'-phosphate
  modified_base 11: mod_base = OTHER; note = 2'-O-methyladenosine-3'-phosphate
  modified_base 12: mod_base = OTHER; note = 2'-O-methyluridine-3'-phosphate
  modified_base 13: mod_base = OTHER; note = 2'-O-methylguanosine-3'-phosphate
  modified_base 14: mod_base = OTHER; note = 2'-fluorouridine-3'-phosphate
  modified_base 15: mod_base = OTHER; note = 2'-O-methylcytidine-3'-phosphate
  modified_base 16: mod_base = OTHER; note = 2'-fluorouridine-3'-phosphate
  modified_base 17: mod_base = OTHER; note = 2'-O-methylguanosine-3'-phosphate
  modified_base 18: mod_base = OTHER; note = 2'-fluorocytidine-3'-phosphate
  modified_base 19: mod_base = OTHER; note = 2'-O-methyluridine-3'-phosphate
  modified_base 20: mod_base = OTHER; note = 2'-fluorouridine-3'-phosphate
  modified_base 21: mod_base = OTHER; note = 2'-O-methylguanosine-3'-phosphorothioate
  modified_base 22: mod_base = OTHER; note = 2'-fluorocytidine-3'-phosphorothioate
  modified_base 23: mod_base = OTHER; note = 2'-O-methyluridine-3'-phosphate
aaaaagataaatgtctgcttgct

SEQ ID NO: 103 - RNA, 21 nt, synthetic construct
  source 1..21: mol_type = other RNA; note = Description of Artificial Sequence: Synthetic oligonucleotide
  modified_base 1: mod_base = OTHER; note = 2'-fluorocytidine-3'-phosphate
  modified_base 2: mod_base = OTHER; note = 2'-O-methyladenosine-3'-phosphate
  modified_base 3: mod_base = OTHER; note = 2'-fluoroadenosine-3'-phosphate
  modified_base 4: mod_base = OTHER; note = 2'-O-methylguanosine-3'-phosphate
  modified_base 5: mod_base = OTHER; note = 2'-fluorocytidine-3'-phosphate
  modified_base 6: mod_base = OTHER; note = 2'-O-methyladenosine-3'-phosphate
  modified_base 7: mod_base = OTHER; note = 2'-fluoroguanosine-3'-phosphate
  modified_base 8: mod_base = OTHER; note = 2'-O-methyladenosine-3'-phosphate
  modified_base 9: mod_base = OTHER; note = 2'-fluorocytidine-3'-phosphate
  modified_base 10: mod_base = OTHER; note = 2'-fluoroadenosine-3'-phosphate
  modified_base 11: mod_base = OTHER; note = 2'-O-methyluridine-3'-phosphate
  modified_base 12: mod_base = OTHER; note = 2'-O-methyluridine-3'-phosphate
  modified_base 13: mod_base = OTHER; note = 2'-fluorouridine-3'-phosphate
  modified_base 14: mod_base = OTHER; note = 2'-O-methyladenosine-3'-phosphate
  modified_base 15: mod_base = OTHER; note = 2'-fluorouridine-3'-phosphate
  modified_base 16: mod_base = OTHER; note = 2'-O-methylcytidine-3'-phosphate
  modified_base 17: mod_base = OTHER; note = 2'-fluorouridine-3'-phosphate
  modified_base 18: mod_base = OTHER; note = 2'-O-methyluridine-3'-phosphate
  modified_base 19: mod_base = OTHER; note = 2'-fluorouridine-3'-phosphate
  modified_base 20: mod_base = OTHER; note = 2'-O-methyluridine-3'-phosphate
  modified_base 21: mod_base = OTHER; note = 2'-fluorouridine-3'-phosphate N-[tris(GalNAc-alkyl)-amidodecanoyl)]-4-hydroxyprolinol Hyp-(GalNAc-alkyl)3
caagcagacatttatcttttt

SEQ ID NO: 104 - RNA, 23 nt, synthetic construct
  source 1..23: mol_type = other RNA; note = Description of Artificial Sequence: Synthetic oligonucleotide
  modified_base 1: mod_base = OTHER; note = 2'-O-methyladenosine-3'-phosphate
  modified_base 2: mod_base = OTHER; note = 2'-fluoroadenosine-3'-phosphate
  modified_base 3: mod_base = OTHER; note = 2'-O-methyladenosine-3'-phosphate
  modified_base 4: mod_base = OTHER; note = 2'-fluoroadenosine-3'-phosphate
  modified_base 5: mod_base = OTHER; note = 2'-O-methyladenosine-3'-phosphate
  modified_base 6: mod_base = OTHER; note = 2'-fluoroguanosine-3'-phosphate
  modified_base 7: mod_base = OTHER; note = 2'-O-methyladenosine-3'-phosphate
  modified_base 8: mod_base = OTHER; note = 2'-fluorouridine-3'-phosphate
  modified_base 9: mod_base = OTHER; note = 2'-O-methyladenosine-3'-phosphate
  modified_base 10: mod_base = OTHER; note = 2'-fluoroadenosine-3'-phosphate
  modified_base 11: mod_base = OTHER; note = 2'-O-methyladenosine-3'-phosphate
  modified_base 12: mod_base = OTHER; note = 2'-O-methyluridine-3'-phosphate
  modified_base 13: mod_base = OTHER; note = 2'-O-methylguanosine-3'-phosphate
  modified_base 14: mod_base = OTHER; note = 2'-fluorouridine-3'-phosphate
  modified_base 15: mod_base = OTHER; note = 2'-O-methylcytidine-3'-phosphate
  modified_base 16: mod_base = OTHER; note = 2'-fluorouridine-3'-phosphate
  modified_base 17: mod_base = OTHER; note = 2'-O-methylguanosine-3'-phosphate
  modified_base 18: mod_base = OTHER; note = 2'-fluorocytidine-3'-phosphate
  modified_base 19: mod_base = OTHER; note = 2'-O-methyluridine-3'-phosphate
  modified_base 20: mod_base = OTHER; note = 2'-fluorouridine-3'-phosphate
  modified_base 21: mod_base = OTHER; note = 2'-O-methylguanosine-3'-phosphorothioate
  modified_base 22: mod_base = OTHER; note = 2'-fluorocytidine-3'-phosphorothioate
  modified_base 23: mod_base = OTHER; note = 2'-O-methyluridine-3'-phosphate
aaaaagataaatgtctgcttgct

SEQ ID NO: 105 - RNA, 21 nt, synthetic construct
  source 1..21: mol_type = other RNA; note = Description of Artificial Sequence: Synthetic oligonucleotide
  modified_base 1: mod_base = OTHER; note = 2'-fluorocytidine-3'-phosphate
  modified_base 2: mod_base = OTHER; note = 2'-O-methyladenosine-3'-phosphate
  modified_base 3: mod_base = OTHER; note = 2'-fluoroadenosine-3'-phosphate
  modified_base 4: mod_base = OTHER; note = 2'-O-methylguanosine-3'-phosphate
  modified_base 5: mod_base = OTHER; note = 2'-fluorocytidine-3'-phosphate
  modified_base 6: mod_base = OTHER; note = 2'-O-methyladenosine-3'-phosphate
  modified_base 7: mod_base = OTHER; note = 2'-fluoroguanosine-3'-phosphate
  modified_base 8: mod_base = OTHER; note = 2'-O-methyladenosine-3'-phosphate
  modified_base 9: mod_base = OTHER; note = 2'-fluorocytidine-3'-phosphate
  modified_base 10: mod_base = OTHER; note = 2'-fluoroadenosine-3'-phosphate
  modified_base 11: mod_base = OTHER; note = 2'-fluorouridine-3'-phosphate
  modified_base 12: mod_base = OTHER; note = 2'-O-methyluridine-3'-phosphate
  modified_base 13: mod_base = OTHER; note = 2'-fluorouridine-3'-phosphate
  modified_base 14: mod_base = OTHER; note = 2'-O-methyladenosine-3'-phosphate
  modified_base 15: mod_base = OTHER; note = 2'-O-methyluridine-3'-phosphate
  modified_base 16: mod_base = OTHER; note = 2'-O-methylcytidine-3'-phosphate
  modified_base 17: mod_base = OTHER; note = 2'-fluorouridine-3'-phosphate
  modified_base 18: mod_base = OTHER; note = 2'-O-methyluridine-3'-phosphate
  modified_base 19: mod_base = OTHER; note = 2'-fluorouridine-3'-phosphate
  modified_base 20: mod_base = OTHER; note = 2'-O-methyluridine-3'-phosphate
  modified_base 21: mod_base = OTHER; note = 2'-fluorouridine-3'-phosphate N-[tris(GalNAc-alkyl)-amidodecanoyl)]-4-hydroxyprolinol Hyp-(GalNAc-alkyl)3
caagcagacatttatcttttt

SEQ ID NO: 106 - RNA, 23 nt, synthetic construct
  source 1..23: mol_type = other RNA; note = Description of Artificial Sequence: Synthetic oligonucleotide
  modified_base 1: mod_base = OTHER; note = 2'-O-methyladenosine-3'-phosphate
  modified_base 2: mod_base = OTHER; note = 2'-fluoroadenosine-3'-phosphate
  modified_base 3: mod_base = OTHER; note = 2'-O-methyladenosine-3'-phosphate
  modified_base 4: mod_base = OTHER; note = 2'-fluoroadenosine-3'-phosphate
  modified_base 5: mod_base = OTHER; note = 2'-O-methyladenosine-3'-phosphate
  modified_base 6: mod_base = OTHER; note = 2'-fluoroguanosine-3'-phosphate
  modified_base 7: mod_base = OTHER; note = 2'-O-methyladenosine-3'-phosphate
  modified_base 8: mod_base = OTHER; note = 2'-fluorouridine-3'-phosphate
  modified_base 9: mod_base = OTHER; note = 2'-O-methyladenosine-3'-phosphate
  modified_base 10: mod_base = OTHER; note = 2'-fluoroadenosine-3'-phosphate
  modified_base 11: mod_base = OTHER; note = 2'-O-methyladenosine-3'-phosphate
  modified_base 12: mod_base = OTHER; note = 2'-O-methyluridine-3'-phosphate
  modified_base 13: mod_base = OTHER; note = 2'-O-methylguanosine-3'-phosphate
  modified_base 14: mod_base = OTHER; note = 2'-fluorouridine-3'-phosphate
  modified_base 15: mod_base = OTHER; note = 2'-O-methylcytidine-3'-phosphate
  modified_base 16: mod_base = OTHER; note = 2'-fluorouridine-3'-phosphate
  modified_base 17: mod_base = OTHER; note = 2'-O-methylguanosine-3'-phosphate
  modified_base 18: mod_base = OTHER; note = 2'-fluorocytidine-3'-phosphate
  modified_base 19: mod_base = OTHER; note = 2'-O-methyluridine-3'-phosphate
  modified_base 20: mod_base = OTHER; note = 2'-fluorouridine-3'-phosphate
  modified_base 21: mod_base = OTHER; note = 2'-O-methylguanosine-3'-phosphorothioate
  modified_base 22: mod_base = OTHER; note = 2'-fluorocytidine-3'-phosphorothioate
  modified_base 23: mod_base = OTHER; note = 2'-O-methyluridine-3'-phosphate
aaaaagataaatgtctgcttgct

SEQ ID NO: 107 - RNA, 21 nt, synthetic construct
  source 1..21: mol_type = other RNA; note = Description of Artificial Sequence: Synthetic oligonucleotide
  modified_base 1: mod_base = OTHER; note = 2'-fluorocytidine-3'-phosphate
  modified_base 2: mod_base = OTHER; note = 2'-O-methyladenosine-3'-phosphate
  modified_base 3: mod_base = OTHER; note = 2'-fluoroadenosine-3'-phosphate
  modified_base 4: mod_base = OTHER; note = 2'-O-methylguanosine-3'-phosphate
  modified_base 5: mod_base = OTHER; note = 2'-fluorocytidine-3'-phosphate
  modified_base 6: mod_base = OTHER; note = 2'-O-methyladenosine-3'-phosphate
  modified_base 7: mod_base = OTHER; note = 2'-fluoroguanosine-3'-phosphate
  modified_base 8: mod_base = OTHER; note = 2'-O-methyladenosine-3'-phosphate
  modified_base 9: mod_base = OTHER; note = 2'-fluorocytidine-3'-phosphate
  modified_base 10: mod_base = OTHER; note = 2'-fluoroadenosine-3'-phosphate
  modified_base 11: mod_base = OTHER; note = 2'-fluorouridine-3'-phosphate
  modified_base 12: mod_base = OTHER; note = 2'-O-methyluridine-3'-phosphate
  modified_base 13: mod_base = OTHER; note = 2'-fluorouridine-3'-phosphate
  modified_base 14: mod_base = OTHER; note = 2'-O-methyladenosine-3'-phosphate
  modified_base 15: mod_base = OTHER; note = 2'-O-methyluridine-3'-phosphate
  modified_base 16: mod_base = OTHER; note = 2'-O-methylcytidine-3'-phosphate
  modified_base 17: mod_base = OTHER; note = 2'-fluorouridine-3'-phosphate
  modified_base 18: mod_base = OTHER; note = 2'-O-methyluridine-3'-phosphate
  modified_base 19: mod_base = OTHER; note = 2'-fluorouridine-3'-phosphate
  modified_base 20: mod_base = OTHER; note = 2'-O-methyluridine-3'-phosphate
  modified_base 21: mod_base = OTHER; note = 2'-fluorouridine-3'-phosphate N-[tris(GalNAc-alkyl)-amidodecanoyl)]-4-hydroxyprolinol Hyp-(GalNAc-alkyl)3
caagcagacatttatcttttt

SEQ ID NO: 108 - RNA, 23 nt, synthetic construct
  source 1..23: mol_type = other RNA; note = Description of Artificial Sequence: Synthetic oligonucleotide
  modified_base 1: mod_base = OTHER; note = 2'-O-methyladenosine-3'-phosphate
  modified_base 2: mod_base = OTHER; note = 2'-fluoroadenosine-3'-phosphate
  modified_base 3: mod_base = OTHER; note = 2'-O-methyladenosine-3'-phosphate
  modified_base 4: mod_base = OTHER; note = 2'-fluoroadenosine-3'-phosphate
  modified_base 5: mod_base = OTHER; note = 2'-O-methyladenosine-3'-phosphate
  modified_base 6: mod_base = OTHER; note = 2'-fluoroguanosine-3'-phosphate
  modified_base 7: mod_base = OTHER; note = 2'-O-methyladenosine-3'-phosphate
  modified_base 8: mod_base = OTHER; note = 2'-fluorouridine-3'-phosphate
  modified_base 9: mod_base = OTHER; note = 2'-O-methyladenosine-3'-phosphate
  modified_base 10: mod_base = OTHER; note = 2'-fluoroadenosine-3'-phosphate
  modified_base 11: mod_base = OTHER; note = 2'-O-methyladenosine-3'-phosphate
  modified_base 12: mod_base = OTHER; note = 2'-O-methyluridine-3'-phosphate
  modified_base 13: mod_base = OTHER; note = 2'-O-methylguanosine-3'-phosphate
  modified_base 14: mod_base = OTHER; note = 2'-fluorouridine-3'-phosphate
  modified_base 15: mod_base = OTHER; note = 2'-O-methylcytidine-3'-phosphate
  modified_base 16: mod_base = OTHER; note = 2'-fluorouridine-3'-phosphate
  modified_base 17: mod_base = OTHER; note = 2'-O-methylguanosine-3'-phosphate
  modified_base 18: mod_base = OTHER; note = 2'-fluorocytidine-3'-phosphate
  modified_base 19: mod_base = OTHER; note = 2'-O-methyluridine-3'-phosphate
  modified_base 20: mod_base = OTHER; note = 2'-fluorouridine-3'-phosphate
  modified_base 21: mod_base = OTHER; note = 2'-O-methylguanosine-3'-phosphorothioate
  modified_base 22: mod_base = OTHER; note = 2'-fluorocytidine-3'-phosphorothioate
  modified_base 23: mod_base = OTHER; note = 2'-O-methyluridine-3'-phosphate
aaaaagataaatgtctgcttgct

SEQ ID NO: 109 - RNA, 21 nt, synthetic construct
  source 1..21: mol_type = other RNA; note = Description of Artificial Sequence: Synthetic oligonucleotide
  modified_base 1: mod_base = OTHER; note = 2'-fluorocytidine-3'-phosphate
  modified_base 2: mod_base = OTHER; note = 2'-O-methyladenosine-3'-phosphate
  modified_base 3: mod_base = OTHER; note = 2'-fluoroadenosine-3'-phosphate
  modified_base 4: mod_base = OTHER; note = 2'-O-methylguanosine-3'-phosphate
  modified_base 5: mod_base = OTHER; note = 2'-fluorocytidine-3'-phosphate
  modified_base 6: mod_base = OTHER; note = 2'-O-methyladenosine-3'-phosphate
  modified_base 7: mod_base = OTHER; note = 2'-fluoroguanosine-3'-phosphate
  modified_base 8: mod_base = OTHER; note = 2'-O-methyladenosine-3'-phosphate
  modified_base 9: mod_base = OTHER; note = 2'-fluorocytidine-3'-phosphate
  modified_base 10: mod_base = OTHER; note = 2'-fluoroadenosine-3'-phosphate
  modified_base 11: mod_base = OTHER; note = 2'-fluorouridine-3'-phosphate
  modified_base 12: mod_base = OTHER; note = 2'-O-methyluridine-3'-phosphate
  modified_base 13: mod_base = OTHER; note = 2'-fluorouridine-3'-phosphate
  modified_base 14: mod_base = OTHER; note = 2'-O-methyladenosine-3'-phosphate
  modified_base 15: mod_base = OTHER; note = 2'-fluorouridine-3'-phosphate
  modified_base 16: mod_base = OTHER; note = 2'-O-methylcytidine-3'-phosphate
  modified_base 17: mod_base = OTHER; note = 2'-fluorouridine-3'-phosphate
  modified_base 18: mod_base = OTHER; note = 2'-O-methyluridine-3'-phosphate
  modified_base 19: mod_base = OTHER; note = 2'-O-methyluridine-3'-phosphate
  modified_base 20: mod_base = OTHER; note = 2'-O-methyluridine-3'-phosphate
  modified_base 21: mod_base = OTHER; note = 2'-fluorouridine-3'-phosphate N-[tris(GalNAc-alkyl)-amidodecanoyl)]-4-hydroxyprolinol Hyp-(GalNAc-alkyl)3
caagcagacatttatcttttt

SEQ ID NO: 110 - RNA, 23 nt, synthetic construct
  source 1..23: mol_type = other RNA; note = Description of Artificial Sequence: Synthetic oligonucleotide
  modified_base 1: mod_base = OTHER; note = 2'-O-methyladenosine-3'-phosphate
  modified_base 2: mod_base = OTHER; note = 2'-fluoroadenosine-3'-phosphate
  modified_base 3: mod_base = OTHER; note = 2'-O-methyladenosine-3'-phosphate
  modified_base 4: mod_base = OTHER; note = 2'-fluoroadenosine-3'-phosphate
  modified_base 5: mod_base = OTHER; note = 2'-O-methyladenosine-3'-phosphate
  modified_base 6: mod_base = OTHER; note = 2'-fluoroguanosine-3'-phosphate
  modified_base 7: mod_base = OTHER; note = 2'-O-methyladenosine-3'-phosphate
  modified_base 8: mod_base = OTHER; note = 2'-fluorouridine-3'-phosphate
  modified_base 9: mod_base = OTHER; note = 2'-O-methyladenosine-3'-phosphate
  modified_base 10: mod_base = OTHER; note = 2'-fluoroadenosine-3'-phosphate
  modified_base 11: mod_base = OTHER; note = 2'-O-methyladenosine-3'-phosphate
  modified_base 12: mod_base = OTHER; note = 2'-O-methyluridine-3'-phosphate
  modified_base 13: mod_base = OTHER; note = 2'-O-methylguanosine-3'-phosphate
  modified_base 14: mod_base = OTHER; note = 2'-fluorouridine-3'-phosphate
  modified_base 15: mod_base = OTHER; note = 2'-O-methylcytidine-3'-phosphate
  modified_base 16: mod_base = OTHER; note = 2'-fluorouridine-3'-phosphate
  modified_base 17: mod_base = OTHER; note = 2'-O-methylguanosine-3'-phosphate
  modified_base 18: mod_base = OTHER; note = 2'-fluorocytidine-3'-phosphate
  modified_base 19: mod_base = OTHER; note = 2'-O-methyluridine-3'-phosphate
  modified_base 20: mod_base = OTHER; note = 2'-fluorouridine-3'-phosphate
  modified_base 21: mod_base = OTHER; note = 2'-O-methylguanosine-3'-phosphorothioate
  modified_base 22: mod_base = OTHER; note = 2'-fluorocytidine-3'-phosphorothioate
  modified_base 23: mod_base = OTHER; note = 2'-O-methyluridine-3'-phosphate
aaaaagataaatgtctgcttgct

SEQ ID NO: 111 - RNA, 21 nt, synthetic construct
  source 1..21: mol_type = other RNA; note = Description of Artificial Sequence: Synthetic oligonucleotide
  modified_base 1: mod_base = OTHER; note = 2'-fluorocytidine-3'-phosphate
  modified_base 2: mod_base = OTHER; note = 2'-O-methyladenosine-3'-phosphate
  modified_base 3: mod_base = OTHER; note = 2'-fluoroadenosine-3'-phosphate
  modified_base 4: mod_base = OTHER; note = 2'-O-methylguanosine-3'-phosphate
  modified_base 5: mod_base = OTHER; note = 2'-fluorocytidine-3'-phosphate
  modified_base 6: mod_base = OTHER; note = 2'-O-methyladenosine-3'-phosphate
  modified_base 7: mod_base = OTHER; note = 2'-fluoroguanosine-3'-phosphate
  modified_base 8: mod_base = OTHER; note = 2'-O-methyladenosine-3'-phosphate
  modified_base 9: mod_base = OTHER; note = 2'-fluorocytidine-3'-phosphate
  modified_base 10: mod_base = OTHER; note = 2'-fluoroadenosine-3'-phosphate
  modified_base 11: mod_base = OTHER; note = 2'-fluorouridine-3'-phosphate
  modified_base 12: mod_base = OTHER; note = 2'-O-methyluridine-3'-phosphate
  modified_base 13: mod_base = OTHER; note = 2'-fluorouridine-3'-phosphate
  modified_base 14: mod_base = OTHER; note = 2'-O-methyladenosine-3'-phosphate
  modified_base 15: mod_base = OTHER; note = 2'-fluorouridine-3'-phosphate
  modified_base 16: mod_base = OTHER; note = 2'-O-methylcytidine-3'-phosphate
  modified_base 17: mod_base = OTHER; note = 2'-fluorouridine-3'-phosphate
  modified_base 18: mod_base = OTHER; note = 2'-O-methyluridine-3'-phosphate
  modified_base 19: mod_base = OTHER; note = 2'-O-methyluridine-3'-phosphate
  modified_base 20: mod_base = OTHER; note = 2'-O-methyluridine-3'-phosphate
  modified_base 21: mod_base = OTHER; note = 2'-fluorouridine-3'-phosphate N-[tris(GalNAc-alkyl)-amidodecanoyl)]-4-hydroxyprolinol Hyp-(GalNAc-alkyl)3
caagcagacatttatcttttt

SEQ ID NO: 112 - RNA, 23 nt, synthetic construct
  source 1..23: mol_type = other RNA; note = Description of Artificial Sequence: Synthetic oligonucleotide
  modified_base 1: mod_base = OTHER; note = 2'-O-methyladenosine-3'-phosphate
  modified_base 2: mod_base = OTHER; note = 2'-fluoroadenosine-3'-phosphate
  modified_base 3: mod_base = OTHER; note = 2'-O-methyladenosine-3'-phosphate
  modified_base 4: mod_base = OTHER; note = 2'-fluoroadenosine-3'-phosphate
  modified_base 5: mod_base = OTHER; note = 2'-O-methyladenosine-3'-phosphate
  modified_base 6: mod_base = OTHER; note = 2'-fluoroguanosine-3'-phosphate
  modified_base 7: mod_base = OTHER; note = 2'-O-methyladenosine-3'-phosphate
  modified_base 8: mod_base = OTHER; note = 2'-fluorouridine-3'-phosphate
  modified_base 9: mod_base = OTHER; note = 2'-O-methyladenosine-3'-phosphate
  modified_base 10: mod_base = OTHER; note = 2'-fluoroadenosine-3'-phosphate
  modified_base 11: mod_base = OTHER; note = 2'-O-methyladenosine-3'-phosphate
  modified_base 12: mod_base = OTHER; note = 2'-O-methyluridine-3'-phosphate
  modified_base 13: mod_base = OTHER; note = 2'-O-methylguanosine-3'-phosphate
  modified_base 14: mod_base = OTHER; note = 2'-fluorouridine-3'-phosphate
  modified_base 15: mod_base = OTHER; note = 2'-O-methylcytidine-3'-phosphate
  modified_base 16: mod_base = OTHER; note = 2'-fluorouridine-3'-phosphate
  modified_base 17: mod_base = OTHER; note = 2'-O-methylguanosine-3'-phosphate
  modified_base 18: mod_base = OTHER; note = 2'-fluorocytidine-3'-phosphate
  modified_base 19: mod_base = OTHER; note = 2'-O-methyluridine-3'-phosphate
  modified_base 20: mod_base = OTHER; note = 2'-fluorouridine-3'-phosphate
  modified_base 21: mod_base = OTHER; note = 2'-O-methylguanosine-3'-phosphorothioate
  modified_base 22: mod_base = OTHER; note = 2'-fluorocytidine-3'-phosphorothioate
  modified_base 23: mod_base = OTHER; note = 2'-O-methyluridine-3'-phosphate
aaaaagataaatgtctgcttgct

SEQ ID NO: 113 - RNA, 21 nt, synthetic construct
  source 1..21: mol_type = other RNA; note = Description of Artificial Sequence: Synthetic oligonucleotide
  modified_base 1: mod_base = OTHER; note = 2'-O-methylcytidine-3'-phosphate
  modified_base 2: mod_base = OTHER; note = 2'-O-methyladenosine-3'-phosphate
  modified_base 3: mod_base = OTHER; note = 2'-O-methyladenosine-3'-phosphate
  modified_base 4: mod_base = OTHER; note = 2'-O-methylguanosine-3'-phosphate
  modified_base 5: mod_base = OTHER; note = 2'-fluorocytidine-3'-phosphate
  modified_base 6: mod_base = OTHER; note = 2'-O-methyladenosine-3'-phosphate
  modified_base 7: mod_base = OTHER; note = 2'-fluoroguanosine-3'-phosphate
  modified_base 8: mod_base = OTHER; note = 2'-O-methyladenosine-3'-phosphate
  modified_base 9: mod_base = OTHER; note = 2'-fluorocytidine-3'-phosphate
  modified_base 10: mod_base = OTHER; note = 2'-fluoroadenosine-3'-phosphate
  modified_base 11: mod_base = OTHER; note = 2'-fluorouridine-3'-phosphate
  modified_base 12: mod_base = OTHER; note = 2'-O-methyluridine-3'-phosphate
  modified_base 13: mod_base = OTHER; note = 2'-fluorouridine-3'-phosphate
  modified_base 14: mod_base = OTHER; note = 2'-O-methyladenosine-3'-phosphate
  modified_base 15: mod_base = OTHER; note = 2'-fluorouridine-3'-phosphate
  modified_base 16: mod_base = OTHER; note = 2'-O-methylcytidine-3'-phosphate
  modified_base 17: mod_base = OTHER; note = 2'-fluorouridine-3'-phosphate
  modified_base 18: mod_base = OTHER; note = 2'-O-methyluridine-3'-phosphate
  modified_base 19: mod_base = OTHER; note = 2'-fluorouridine-3'-phosphate
  modified_base 20: mod_base = OTHER; note = 2'-O-methyluridine-3'-phosphate
  modified_base 21: mod_base = OTHER; note = 2'-fluorouridine-3'-phosphate N-[tris(GalNAc-alkyl)-amidodecanoyl)]-4-hydroxyprolinol Hyp-(GalNAc-alkyl)3
caagcagacatttatcttttt

SEQ ID NO: 114 - RNA, 23 nt, synthetic construct
  source 1..23: mol_type = other RNA; note = Description of Artificial Sequence: Synthetic oligonucleotide
  modified_base 1: mod_base = OTHER; note = 2'-O-methyladenosine-3'-phosphate
  modified_base 2: mod_base = OTHER; note = 2'-fluoroadenosine-3'-phosphate
  modified_base 3: mod_base = OTHER; note = 2'-O-methyladenosine-3'-phosphate
  modified_base 4: mod_base = OTHER; note = 2'-fluoroadenosine-3'-phosphate
  modified_base 5: mod_base = OTHER; note = 2'-O-methyladenosine-3'-phosphate
  modified_base 6: mod_base = OTHER; note = 2'-fluoroguanosine-3'-phosphate
  modified_base 7: mod_base = OTHER; note = 2'-O-methyladenosine-3'-phosphate
  modified_base 8: mod_base = OTHER; note = 2'-fluorouridine-3'-phosphate
  modified_base 9: mod_base = OTHER; note = 2'-O-methyladenosine-3'-phosphate
  modified_base 10: mod_base = OTHER; note = 2'-fluoroadenosine-3'-phosphate
  modified_base 11: mod_base = OTHER; note = 2'-O-methyladenosine-3'-phosphate
  modified_base 12: mod_base = OTHER; note = 2'-O-methyluridine-3'-phosphate
  modified_base 13: mod_base = OTHER; note = 2'-O-methylguanosine-3'-phosphate
  modified_base 14: mod_base = OTHER; note = 2'-fluorouridine-3'-phosphate
  modified_base 15: mod_base = OTHER; note = 2'-O-methylcytidine-3'-phosphate
  modified_base 16: mod_base = OTHER; note = 2'-fluorouridine-3'-phosphate
  modified_base 17: mod_base = OTHER; note = 2'-O-methylguanosine-3'-phosphate
  modified_base 18: mod_base = OTHER; note = 2'-fluorocytidine-3'-phosphate
  modified_base 19: mod_base = OTHER; note = 2'-O-methyluridine-3'-phosphate
  modified_base 20: mod_base = OTHER; note = 2'-fluorouridine-3'-phosphate
  modified_base 21: mod_base = OTHER; note = 2'-O-methylguanosine-3'-phosphorothioate
  modified_base 22: mod_base = OTHER; note = 2'-fluorocytidine-3'-phosphorothioate
  modified_base 23: mod_base = OTHER; note = 2'-O-methyluridine-3'-phosphate
aaaaagataaatgtctgcttgct

SEQ ID NO: 115 - RNA, 21 nt, synthetic construct
  source 1..21: mol_type = other RNA; note = Description of Artificial Sequence: Synthetic oligonucleotide
  modified_base 1: mod_base = OTHER; note = 2'-fluorocytidine-3'-phosphate
  modified_base 2: mod_base = OTHER; note = 2'-O-methyladenosine-3'-phosphate
  modified_base 3: mod_base = OTHER; note = 2'-fluoroadenosine-3'-phosphate
  modified_base 4: mod_base = OTHER; note = 2'-O-methylguanosine-3'-phosphate
  modified_base 5: mod_base = OTHER; note = 2'-O-methylcytidine-3'-phosphate
  modified_base 6: mod_base = OTHER; note = 2'-O-methyladenosine-3'-phosphate
  modified_base 7: mod_base = OTHER; note = 2'-O-methylguanosine-3'-phosphate
  modified_base 8: mod_base = OTHER; note = 2'-O-methyladenosine-3'-phosphate
  modified_base 9: mod_base = OTHER; note = 2'-fluorocytidine-3'-phosphate
  modified_base 10: mod_base = OTHER; note = 2'-fluoroadenosine-3'-phosphate
  modified_base 11: mod_base = OTHER; note = 2'-fluorouridine-3'-phosphate
  modified_base 12: mod_base = OTHER; note = 2'-O-methyluridine-3'-phosphate
  modified_base 13: mod_base = OTHER; note = 2'-fluorouridine-3'-phosphate
  modified_base 14: mod_base = OTHER; note = 2'-O-methyladenosine-3'-phosphate
  modified_base 15: mod_base = OTHER; note = 2'-fluorouridine-3'-phosphate
  modified_base 16: mod_base = OTHER; note = 2'-O-methylcytidine-3'-phosphate
  modified_base 17: mod_base = OTHER; note = 2'-fluorouridine-3'-phosphate
  modified_base 18: mod_base = OTHER; note = 2'-O-methyluridine-3'-phosphate
  modified_base 19: mod_base = OTHER; note = 2'-fluorouridine-3'-phosphate
  modified_base 20: mod_base = OTHER; note = 2'-O-methyluridine-3'-phosphate
  modified_base 21: mod_base = OTHER; note = 2'-fluorouridine-3'-phosphate N-[tris(GalNAc-alkyl)-amidodecanoyl)]-4-hydroxyprolinol Hyp-(GalNAc-alkyl)3
caagcagacatttatcttttt

SEQ ID NO: 116 - RNA, 23 nt, synthetic construct
  source 1..23: mol_type = other RNA; note = Description of Artificial Sequence: Synthetic oligonucleotide
  modified_base 1: mod_base = OTHER; note = 2'-O-methyladenosine-3'-phosphate
  modified_base 2: mod_base = OTHER; note = 2'-fluoroadenosine-3'-phosphate
  modified_base 3: mod_base = OTHER; note = 2'-O-methyladenosine-3'-phosphate
  modified_base 4: mod_base = OTHER; note = 2'-fluoroadenosine-3'-phosphate
  modified_base 5: mod_base = OTHER; note = 2'-O-methyladenosine-3'-phosphate
  modified_base 6: mod_base = OTHER; note = 2'-fluoroguanosine-3'-phosphate
  modified_base 7: mod_base = OTHER; note = 2'-O-methyladenosine-3'-phosphate
  modified_base 8: mod_base = OTHER; note = 2'-fluorouridine-3'-phosphate
  modified_base 9: mod_base = OTHER; note = 2'-O-methyladenosine-3'-phosphate
  modified_base 10: mod_base = OTHER; note = 2'-fluoroadenosine-3'-phosphate
  modified_base 11: mod_base = OTHER; note = 2'-O-methyladenosine-3'-phosphate
  modified_base 12: mod_base = OTHER; note = 2'-O-methyluridine-3'-phosphate
  modified_base 13: mod_base = OTHER; note = 2'-O-methylguanosine-3'-phosphate
  modified_base 14: mod_base = OTHER; note = 2'-fluorouridine-3'-phosphate
  modified_base 15: mod_base = OTHER; note = 2'-O-methylcytidine-3'-phosphate
  modified_base 16: mod_base = OTHER; note = 2'-fluorouridine-3'-phosphate
  modified_base 17: mod_base = OTHER; note = 2'-O-methylguanosine-3'-phosphate
  modified_base 18: mod_base = OTHER; note = 2'-fluorocytidine-3'-phosphate
  modified_base 19: mod_base = OTHER; note = 2'-O-methyluridine-3'-phosphate
  modified_base 20: mod_base = OTHER; note = 2'-fluorouridine-3'-phosphate
  modified_base 21: mod_base = OTHER; note = 2'-O-methylguanosine-3'-phosphorothioate
  modified_base 22: mod_base = OTHER; note = 2'-fluorocytidine-3'-phosphorothioate
  modified_base 23: mod_base = OTHER; note = 2'-O-methyluridine-3'-phosphate
aaaaagataaatgtctgcttgct

SEQ ID NO: 117 - RNA, 21 nt, synthetic construct
  source 1..21: mol_type = other RNA; note = Description of Artificial Sequence: Synthetic oligonucleotide
  modified_base 1: mod_base = OTHER; note = 2'-fluorocytidine-3'-phosphate
  modified_base 2: mod_base = OTHER; note = 2'-O-methyladenosine-3'-phosphate
  modified_base 3: mod_base = OTHER; note = 2'-fluoroadenosine-3'-phosphate
  modified_base 4: mod_base = OTHER; note = 2'-O-methylguanosine-3'-phosphate
  modified_base 5: mod_base = OTHER; note = 2'-fluorocytidine-3'-phosphate
  modified_base 6: mod_base = OTHER; note = 2'-O-methyladenosine-3'-phosphate
  modified_base 7: mod_base = OTHER; note = 2'-fluoroguanosine-3'-phosphate
  modified_base 8: mod_base = OTHER; note = 2'-O-methyladenosine-3'-phosphate
  modified_base 9: mod_base = OTHER; note = 2'-fluorocytidine-3'-phosphate
  modified_base 10: mod_base = OTHER; note = 2'-fluoroadenosine-3'-phosphate
  modified_base 11: mod_base = OTHER; note = 2'-O-methyluridine-3'-phosphate
  modified_base 12: mod_base = OTHER; note = 2'-O-methyluridine-3'-phosphate
  modified_base 13: mod_base = OTHER; note = 2'-O-methyluridine-3'-phosphate
  modified_base 14: mod_base = OTHER; note = 2'-O-methyladenosine-3'-phosphate
  modified_base 15: mod_base = OTHER; note = 2'-fluorouridine-3'-phosphate
  modified_base 16: mod_base = OTHER; note = 2'-O-methylcytidine-3'-phosphate
  modified_base 17: mod_base = OTHER; note = 2'-fluorouridine-3'-phosphate
  modified_base 18: mod_base = OTHER; note = 2'-O-methyluridine-3'-phosphate
  modified_base 19: mod_base = OTHER; note = 2'-fluorouridine-3'-phosphate
  modified_base 20: mod_base = OTHER; note = 2'-O-methyluridine-3'-phosphate
  modified_base 21: mod_base = OTHER; note = 2'-fluorouridine-3'-phosphate N-[tris(GalNAc-alkyl)-amidodecanoyl)]-4-hydroxyprolinol Hyp-(GalNAc-alkyl)3
caagcagacatttatcttttt

SEQ ID NO: 118 - RNA, 23 nt, synthetic construct
  source 1..23: mol_type = other RNA; note = Description of Artificial Sequence: Synthetic oligonucleotide
  modified_base 1: mod_base = OTHER; note = 2'-O-methyladenosine-3'-phosphate
  modified_base 2: mod_base = OTHER; note = 2'-fluoroadenosine-3'-phosphate
  modified_base 3: mod_base = OTHER; note = 2'-O-methyladenosine-3'-phosphate
  modified_base 4: mod_base = OTHER; note = 2'-fluoroadenosine-3'-phosphate
  modified_base 5: mod_base = OTHER; note = 2'-O-methyladenosine-3'-phosphate
  modified_base 6: mod_base = OTHER; note = 2'-fluoroguanosine-3'-phosphate
  modified_base 7: mod_base = OTHER; note = 2'-O-methyladenosine-3'-phosphate
  modified_base 8: mod_base = OTHER; note = 2'-fluorouridine-3'-phosphate
  modified_base 9: mod_base = OTHER; note = 2'-O-methyladenosine-3'-phosphate
  modified_base 10: mod_base = OTHER; note = 2'-fluoroadenosine-3'-phosphate
  modified_base 11: mod_base = OTHER; note = 2'-O-methyladenosine-3'-phosphate
  modified_base 12: mod_base = OTHER; note = 2'-O-methyluridine-3'-phosphate
  modified_base 13: mod_base = OTHER; note = 2'-O-methylguanosine-3'-phosphate
  modified_base 14: mod_base = OTHER; note = 2'-fluorouridine-3'-phosphate
  modified_base 15: mod_base = OTHER; note = 2'-O-methylcytidine-3'-phosphate
  modified_base 16: mod_base = OTHER; note = 2'-fluorouridine-3'-phosphate
  modified_base 17: mod_base = OTHER; note = 2'-O-methylguanosine-3'-phosphate
  modified_base 18: mod_base = OTHER; note = 2'-fluorocytidine-3'-phosphate
  modified_base 19: mod_base = OTHER; note = 2'-O-methyluridine-3'-phosphate
  modified_base 20: mod_base = OTHER; note = 2'-fluorouridine-3'-phosphate
  modified_base 21: mod_base = OTHER; note = 2'-O-methylguanosine-3'-phosphorothioate
  modified_base 22: mod_base = OTHER; note = 2'-fluorocytidine-3'-phosphorothioate
  modified_base 23: mod_base = OTHER; note = 2'-O-methyluridine-3'-phosphate
aaaaagataaatgtctgcttgct

SEQ ID NO: 119 - RNA, 21 nt, synthetic construct
  source 1..21: mol_type = other RNA; note = Description of Artificial Sequence: Synthetic oligonucleotide
  modified_base 1: mod_base = OTHER; note = 2'-fluorocytidine-3'-phosphate
  modified_base 2: mod_base = OTHER; note = 2'-O-methyladenosine-3'-phosphate
  modified_base 3: mod_base = OTHER; note = 2'-fluoroadenosine-3'-phosphate
  modified_base 4: mod_base = OTHER; note = 2'-O-methylguanosine-3'-phosphate
  modified_base 5: mod_base = OTHER; note = 2'-fluorocytidine-3'-phosphate
  modified_base 6: mod_base = OTHER; note = 2'-O-methyladenosine-3'-phosphate
  modified_base 7: mod_base = OTHER; note = 2'-fluoroguanosine-3'-phosphate
  modified_base 8: mod_base = OTHER; note = 2'-O-methyladenosine-3'-phosphate
  modified_base 9: mod_base = OTHER; note = 2'-fluorocytidine-3'-phosphate
  modified_base 10: mod_base = OTHER; note = 2'-fluoroadenosine-3'-phosphate
  modified_base 11: mod_base = OTHER; note = 2'-fluorouridine-3'-phosphate
  modified_base 12: mod_base = OTHER; note = 2'-O-methyluridine-3'-phosphate
  modified_base 13: mod_base = OTHER; note = 2'-fluorouridine-3'-phosphate
  modified_base 14: mod_base = OTHER; note = 2'-O-methyladenosine-3'-phosphate
  modified_base 15: mod_base = OTHER; note = 2'-O-methyluridine-3'-phosphate
  modified_base 16: mod_base = OTHER; note = 2'-O-methylcytidine-3'-phosphate
  modified_base 17: mod_base = OTHER; note = 2'-O-methyluridine-3'-phosphate
  modified_base 18: mod_base = OTHER; note = 2'-O-methyluridine-3'-phosphate
  modified_base 19: mod_base = OTHER; note = 2'-fluorouridine-3'-phosphate
  modified_base 20: mod_base = OTHER; note = 2'-O-methyluridine-3'-phosphate
  modified_base 21: mod_base = OTHER; note = 2'-fluorouridine-3'-phosphate N-[tris(GalNAc-alkyl)-amidodecanoyl)]-4-hydroxyprolinol Hyp-(GalNAc-alkyl)3
caagcagacatttatcttttt

SEQ ID NO: 120 - RNA, 23 nt, synthetic construct
  source 1..23: mol_type = other RNA; note = Description of Artificial Sequence: Synthetic oligonucleotide
  modified_base 1: mod_base = OTHER; note = 2'-O-methyladenosine-3'-phosphate
  modified_base 2: mod_base = OTHER; note = 2'-fluoroadenosine-3'-phosphate
  modified_base 3: mod_base = OTHER; note = 2'-O-methyladenosine-3'-phosphate
  modified_base 4: mod_base = OTHER; note = 2'-fluoroadenosine-3'-phosphate
  modified_base 5: mod_base = OTHER; note = 2'-O-methyladenosine-3'-phosphate
  modified_base 6: mod_base = OTHER; note = 2'-fluoroguanosine-3'-phosphate
  modified_base 7: mod_base = OTHER; note = 2'-O-methyladenosine-3'-phosphate
  modified_base 8: mod_base = OTHER; note = 2'-fluorouridine-3'-phosphate
  modified_base 9: mod_base = OTHER; note = 2'-O-methyladenosine-3'-phosphate
  modified_base 10: mod_base = OTHER; note = 2'-fluoroadenosine-3'-phosphate
  modified_base 11: mod_base = OTHER; note = 2'-O-methyladenosine-3'-phosphate
  modified_base 12: mod_base = OTHER; note = 2'-O-methyluridine-3'-phosphate
  modified_base 13: mod_base = OTHER; note = 2'-O-methylguanosine-3'-phosphate
  modified_base 14: mod_base = OTHER; note = 2'-fluorouridine-3'-phosphate
  modified_base 15: mod_base = OTHER; note = 2'-O-methylcytidine-3'-phosphate
  modified_base 16: mod_base = OTHER; note = 2'-fluorouridine-3'-phosphate
  modified_base 17: mod_base = OTHER; note = 2'-O-methylguanosine-3'-phosphate
  modified_base 18: mod_base = OTHER; note = 2'-fluorocytidine-3'-phosphate
  modified_base 19: mod_base = OTHER; note = 2'-O-methyluridine-3'-phosphate
  modified_base 20: mod_base = OTHER; note = 2'-fluorouridine-3'-phosphate
  modified_base 21: mod_base = OTHER; note = 2'-O-methylguanosine-3'-phosphorothioate
  modified_base 22: mod_base = OTHER; note = 2'-fluorocytidine-3'-phosphorothioate
  modified_base 23: mod_base = OTHER; note = 2'-O-methyluridine-3'-phosphate
aaaaagataaatgtctgcttgct

SEQ ID NO: 121 - RNA, 21 nt, synthetic construct
  source 1..21: mol_type = other RNA; note = Description of Artificial Sequence: Synthetic oligonucleotide
  modified_base 1: mod_base = OTHER; note = 2'-fluorocytidine-3'-phosphate
  modified_base 2: mod_base = OTHER; note = 2'-O-methyladenosine-3'-phosphate
  modified_base 3: mod_base = OTHER; note = 2'-fluoroadenosine-3'-phosphate
  modified_base 4: mod_base = OTHER; note = 2'-O-methylguanosine-3'-phosphate
  modified_base 5: mod_base = OTHER; note = 2'-fluorocytidine-3'-phosphate
  modified_base 6: mod_base = OTHER; note = 2'-O-methyladenosine-3'-phosphate
  modified_base 7: mod_base = OTHER; note = 2'-fluoroguanosine-3'-phosphate
  modified_base 8: mod_base = OTHER; note = 2'-O-methyladenosine-3'-phosphate
  modified_base 9: mod_base = OTHER; note = 2'-fluorocytidine-3'-phosphate
  modified_base 10: mod_base = OTHER; note = 2'-fluoroadenosine-3'-phosphate
  modified_base 11: mod_base = OTHER; note = 2'-fluorouridine-3'-phosphate
  modified_base 12: mod_base = OTHER; note = 2'-O-methyluridine-3'-phosphate
  modified_base 13: mod_base = OTHER; note = 2'-fluorouridine-3'-phosphate
  modified_base 14: mod_base = OTHER; note = 2'-O-methyladenosine-3'-phosphate
  modified_base 15: mod_base = OTHER; note = 2'-fluorouridine-3'-phosphate
  modified_base 16: mod_base = OTHER; note = 2'-O-methylcytidine-3'-phosphate
  modified_base 17: mod_base = OTHER; note = 2'-fluorouridine-3'-phosphate
  modified_base 18: mod_base = OTHER; note = 2'-O-methyluridine-3'-phosphate
  modified_base 19: mod_base = OTHER; note = 2'-O-methyluridine-3'-phosphate
  modified_base 20: mod_base = OTHER; note = 2'-O-methyluridine-3'-phosphate
  modified_base 21: mod_base = OTHER; note = 2'-O-methyluridine-3'-phosphate N-[tris(GalNAc-alkyl)-amidodecanoyl)]-4-hydroxyprolinol Hyp-(GalNAc-alkyl)3
caagcagacatttatcttttt

SEQ ID NO: 122 - RNA, 23 nt, synthetic construct
  source 1..23: mol_type = other RNA; note = Description of Artificial Sequence: Synthetic oligonucleotide
  modified_base 1: mod_base = OTHER; note = 2'-O-methyladenosine-3'-phosphate
  modified_base 2: mod_base = OTHER; note = 2'-fluoroadenosine-3'-phosphate
  modified_base 3: mod_base = OTHER; note = 2'-O-methyladenosine-3'-phosphate
  modified_base 4: mod_base = OTHER; note = 2'-fluoroadenosine-3'-phosphate
  modified_base 5: mod_base = OTHER; note = 2'-O-methyladenosine-3'-phosphate
  modified_base 6: mod_base = OTHER; note = 2'-fluoroguanosine-3'-phosphate
  modified_base 7: mod_base = OTHER; note = 2'-O-methyladenosine-3'-phosphate
  modified_base 8: mod_base = OTHER; note = 2'-fluorouridine-3'-phosphate
  modified_base 9: mod_base = OTHER; note = 2'-O-methyladenosine-3'-phosphate
  modified_base 10: mod_base = OTHER; note = 2'-fluoroadenosine-3'-phosphate
  modified_base 11: mod_base = OTHER; note = 2'-O-methyladenosine-3'-phosphate
  modified_base 12: mod_base = OTHER; note = 2'-O-methyluridine-3'-phosphate
  modified_base 13: mod_base = OTHER; note = 2'-O-methylguanosine-3'-phosphate
  modified_base 14: mod_base = OTHER; note = 2'-fluorouridine-3'-phosphate
  modified_base 15: mod_base = OTHER; note = 2'-O-methylcytidine-3'-phosphate
  modified_base 16: mod_base = OTHER; note = 2'-fluorouridine-3'-phosphate
  modified_base 17: mod_base = OTHER; note = 2'-O-methylguanosine-3'-phosphate
  modified_base 18: mod_base = OTHER; note = 2'-fluorocytidine-3'-phosphate
  modified_base 19: mod_base = OTHER; note = 2'-O-methyluridine-3'-phosphate
  modified_base 20: mod_base = OTHER; note = 2'-fluorouridine-3'-phosphate
  modified_base 21: mod_base = OTHER; note = 2'-O-methylguanosine-3'-phosphorothioate
  modified_base 22: mod_base = OTHER; note = 2'-fluorocytidine-3'-phosphorothioate
  modified_base 23: mod_base = OTHER; note = 2'-O-methyluridine-3'-phosphate
aaaaagataaatgtctgcttgct

SEQ ID NO: 123 - RNA, 21 nt, synthetic construct
  source 1..21: mol_type = other RNA; note = Description of Artificial Sequence: Synthetic oligonucleotide
  modified_base 1: mod_base = OTHER; note = 2'-fluorocytidine-3'-phosphate
  modified_base 2: mod_base = OTHER; note = 2'-O-methyladenosine-3'-phosphate
  modified_base 3: mod_base = OTHER; note = 2'-fluoroadenosine-3'-phosphate
  modified_base 4: mod_base = OTHER; note = 2'-O-methylguanosine-3'-phosphate
  modified_base 5: mod_base = OTHER; note = 2'-fluorocytidine-3'-phosphate
  modified_base 6: mod_base = OTHER; note = 2'-O-methyladenosine-3'-phosphate
  modified_base 7: mod_base = OTHER; note = 2'-fluoroguanosine-3'-phosphate
  modified_base 8: mod_base = OTHER; note = 2'-O-methyladenosine-3'-phosphate
  modified_base 9: mod_base = OTHER; note = 2'-fluorocytidine-3'-phosphate
  modified_base 10: mod_base = OTHER; note = 2'-fluoroadenosine-3'-phosphate
  modified_base 11: mod_base = OTHER; note = 2'-fluorouridine-3'-phosphate
  modified_base 12: mod_base = OTHER; note = 2'-O-methyluridine-3'-phosphate
  modified_base 13: mod_base = OTHER; note = 2'-fluorouridine-3'-phosphate
  modified_base 14: mod_base = OTHER; note = 2'-O-methyladenosine-3'-phosphate
  modified_base 15: mod_base = OTHER; note = 2'-fluorouridine-3'-phosphate
  modified_base 16: mod_base = OTHER; note = 2'-O-methylcytidine-3'-phosphate
  modified_base 17: mod_base = OTHER; note = 2'-fluorouridine-3'-phosphate
  modified_base 18: mod_base = OTHER; note = 2'-fluorouridine-3'-phosphate
  modified_base 19: mod_base = OTHER; note = 2'-fluorouridine-3'-phosphate
  modified_base 20: mod_base = OTHER; note = 2'-O-methyluridine-3'-phosphate
  modified_base 21: mod_base = OTHER; note = 2'-fluorouridine-3'-phosphate N-[tris(GalNAc-alkyl)-amidodecanoyl)]-4-hydroxyprolinol Hyp-(GalNAc-alkyl)3
caagcagacatttatcttttt

SEQ ID NO: 124 - RNA, 23 nt, synthetic construct
  source 1..23: mol_type = other RNA; note = Description of Artificial Sequence: Synthetic oligonucleotide
  modified_base 1: mod_base = OTHER; note = 2'-O-methyladenosine-3'-phosphate
  modified_base 2: mod_base = OTHER; note = 2'-fluoroadenosine-3'-phosphate
  modified_base 3: mod_base = OTHER; note = 2'-O-methyladenosine-3'-phosphate
  modified_base 4: mod_base = OTHER; note = 2'-fluoroadenosine-3'-phosphate
  modified_base 5: mod_base = OTHER; note = 2'-O-methyladenosine-3'-phosphate
  modified_base 6: mod_base = OTHER; note = 2'-fluoroguanosine-3'-phosphate
  modified_base 7: mod_base = OTHER; note = 2'-O-methyladenosine-3'-phosphate
  modified_base 8: mod_base = OTHER; note = 2'-fluorouridine-3'-phosphate
  modified_base 9: mod_base = OTHER; note = 2'-O-methyladenosine-3'-phosphate
  modified_base 10: mod_base = OTHER; note = 2'-fluoroadenosine-3'-phosphate
  modified_base 11: mod_base = OTHER; note = 2'-O-methyladenosine-3'-phosphate
  modified_base 12: mod_base = OTHER; note = 2'-O-methyluridine-3'-phosphate
  modified_base 13: mod_base = OTHER; note = 2'-O-methylguanosine-3'-phosphate
  modified_base 14: mod_base = OTHER; note = 2'-fluorouridine-3'-phosphate
  modified_base 15: mod_base = OTHER; note = 2'-O-methylcytidine-3'-phosphate
  modified_base 16: mod_base = OTHER; note = 2'-fluorouridine-3'-phosphate
  modified_base 17: mod_base = OTHER; note = 2'-O-methylguanosine-3'-phosphate
  modified_base 18: mod_base = OTHER; note = 2'-fluorocytidine-3'-phosphate
  modified_base 19: mod_base = OTHER; note = 2'-O-methyluridine-3'-phosphate
  modified_base 20: mod_base = OTHER; note = 2'-fluorouridine-3'-phosphate
  modified_base 21: mod_base = OTHER; note = 2'-O-methylguanosine-3'-phosphorothioate
  modified_base 22: mod_base = OTHER; note = 2'-fluorocytidine-3'-phosphorothioate
  modified_base 23: mod_base = OTHER; note = 2'-O-methyluridine-3'-phosphate
aaaaagataaatgtctgcttgct

SEQ ID NO: 125 - RNA, 21 nt, synthetic construct
  source 1..21: mol_type = other RNA; note = Description of Artificial Sequence: Synthetic oligonucleotide
  modified_base 1: mod_base = OTHER; note = 2'-fluorocytidine-3'-phosphate
  modified_base 2: mod_base = OTHER; note = 2'-O-methyladenosine-3'-phosphate
  modified_base 3: mod_base = OTHER; note = 2'-fluoroadenosine-3'-phosphate
  modified_base 4: mod_base = OTHER; note = 2'-O-methylguanosine-3'-phosphate
  modified_base 5: mod_base = OTHER; note = 2'-fluorocytidine-3'-phosphate
  modified_base 6: mod_base = OTHER; note = 2'-O-methyladenosine-3'-phosphate
  modified_base 7: mod_base = OTHER; note = 2'-fluoroguanosine-3'-phosphate
  modified_base 8: mod_base = OTHER; note = 2'-O-methyladenosine-3'-phosphate
  modified_base 9: mod_base = OTHER; note = 2'-fluorocytidine-3'-phosphate
  modified_base 10: mod_base = OTHER; note = 2'-fluoroadenosine-3'-phosphate
  modified_base 11: mod_base = OTHER; note = 2'-fluorouridine-3'-phosphate
  modified_base 12: mod_base = OTHER; note = 2'-O-methyluridine-3'-phosphate
  modified_base 13: mod_base = OTHER; note = 2'-fluorouridine-3'-phosphate
  modified_base 14: mod_base = OTHER; note = 2'-O-methyladenosine-3'-phosphate
  modified_base 15: mod_base = OTHER; note = 2'-fluorouridine-3'-phosphate
  modified_base 16: mod_base = OTHER; note = 2'-fluorocytidine-3'-phosphate
  modified_base 17: mod_base = OTHER; note = 2'-fluorouridine-3'-phosphate
  modified_base 18: mod_base = OTHER; note = 2'-O-methyluridine-3'-phosphate
  modified_base 19: mod_base = OTHER; note = 2'-fluorouridine-3'-phosphate
  modified_base 20: mod_base = OTHER; note = 2'-O-methyluridine-3'-phosphate
  modified_base 21: mod_base = OTHER; note = 2'-fluorouridine-3'-phosphate N-[tris(GalNAc-alkyl)-amidodecanoyl)]-4-hydroxyprolinol Hyp-(GalNAc-alkyl)3
caagcagacatttatcttttt

SEQ ID NO: 126 - RNA, 23 nt, synthetic construct
  source 1..23: mol_type = other RNA; note = Description of Artificial Sequence: Synthetic oligonucleotide
  modified_base 1: mod_base = OTHER; note = 2'-O-methyladenosine-3'-phosphate
  modified_base 2: mod_base = OTHER; note = 2'-fluoroadenosine-3'-phosphate
  modified_base 3: mod_base = OTHER; note = 2'-O-methyladenosine-3'-phosphate
  modified_base 4: mod_base = OTHER; note = 2'-fluoroadenosine-3'-phosphate
  modified_base 5: mod_base = OTHER; note = 2'-O-methyladenosine-3'-phosphate
  modified_base 6: mod_base = OTHER; note = 2'-fluoroguanosine-3'-phosphate
  modified_base 7: mod_base = OTHER; note = 2'-O-methyladenosine-3'-phosphate
  modified_base 8: mod_base = OTHER; note = 2'-fluorouridine-3'-phosphate
  modified_base 9: mod_base = OTHER; note = 2'-O-methyladenosine-3'-phosphate
  modified_base 10: mod_base = OTHER; note = 2'-fluoroadenosine-3'-phosphate
  modified_base 11: mod_base = OTHER; note = 2'-O-methyladenosine-3'-phosphate
  modified_base 12: mod_base = OTHER; note = 2'-O-methyluridine-3'-phosphate
  modified_base 13: mod_base = OTHER; note = 2'-O-methylguanosine-3'-phosphate
  modified_base 14: mod_base = OTHER; note = 2'-fluorouridine-3'-phosphate
  modified_base 15: mod_base = OTHER; note = 2'-O-methylcytidine-3'-phosphate
  modified_base 16: mod_base = OTHER; note = 2'-fluorouridine-3'-phosphate
  modified_base 17: mod_base = OTHER; note = 2'-O-methylguanosine-3'-phosphate
  modified_base 18: mod_base = OTHER; note = 2'-fluorocytidine-3'-phosphate
  modified_base 19: mod_base = OTHER; note = 2'-O-methyluridine-3'-phosphate
  modified_base 20: mod_base = OTHER; note = 2'-fluorouridine-3'-phosphate
  modified_base 21: mod_base = OTHER; note = 2'-O-methylguanosine-3'-phosphorothioate
  modified_base 22: mod_base = OTHER; note = 2'-fluorocytidine-3'-phosphorothioate
  modified_base 23: mod_base = OTHER; note = 2'-O-methyluridine-3'-phosphate
aaaaagataaatgtctgcttgct

SEQ ID NO: 127 - RNA, 21 nt, synthetic construct
  source 1..21: mol_type = other RNA; note = Description of Artificial Sequence: Synthetic oligonucleotide
  modified_base 1: mod_base = OTHER; note = 2'-fluorocytidine-3'-phosphate
  modified_base 2: mod_base = OTHER; note = 2'-O-methyladenosine-3'-phosphate
  modified_base 3: mod_base = OTHER; note = 2'-fluoroadenosine-3'-phosphate
  modified_base 4: mod_base = OTHER; note = 2'-O-methylguanosine-3'-phosphate
  modified_base 5: mod_base = OTHER; note = 2'-fluorocytidine-3'-phosphate
  modified_base 6: mod_base = OTHER; note = 2'-O-methyladenosine-3'-phosphate
  modified_base 7: mod_base = OTHER; note = 2'-fluoroguanosine-3'-phosphate
  modified_base 8: mod_base = OTHER; note = 2'-O-methyladenosine-3'-phosphate
  modified_base 9: mod_base = OTHER; note = 2'-fluorocytidine-3'-phosphate
  modified_base 10: mod_base = OTHER; note = 2'-fluoroadenosine-3'-phosphate
  modified_base 11: mod_base = OTHER; note = 2'-fluorouridine-3'-phosphate
  modified_base 12: mod_base = OTHER; note = 2'-O-methyluridine-3'-phosphate
  modified_base 13: mod_base = OTHER; note = 2'-fluorouridine-3'-phosphate
  modified_base 14: mod_base = OTHER; note = 2'-fluoroadenosine-3'-phosphate
  modified_base 15: mod_base = OTHER; note = 2'-fluorouridine-3'-phosphate
  modified_base 16: mod_base = OTHER; note = 2'-O-methylcytidine-3'-phosphate
  modified_base 17: mod_base = OTHER; note = 2'-fluorouridine-3'-phosphate
  modified_base 18: mod_base = OTHER; note = 2'-O-methyluridine-3'-phosphate
  modified_base 19: mod_base = OTHER; note = 2'-fluorouridine-3'-phosphate
  modified_base 20: mod_base = OTHER; note = 2'-O-methyluridine-3'-phosphate
  modified_base 21: mod_base = OTHER; note = 2'-fluorouridine-3'-phosphate N-[tris(GalNAc-alkyl)-amidodecanoyl)]-4-hydroxyprolinol Hyp-(GalNAc-alkyl)3
caagcagacatttatcttttt

SEQ ID NO: 128 - RNA, 23 nt, synthetic construct
  source 1..23: mol_type = other RNA; note = Description of Artificial Sequence: Synthetic oligonucleotide
  modified_base 1: mod_base = OTHER; note = 2'-O-methyladenosine-3'-phosphate
  modified_base 2: mod_base = OTHER; note = 2'-fluoroadenosine-3'-phosphate
  modified_base 3: mod_base = OTHER; note = 2'-O-methyladenosine-3'-phosphate
  modified_base 4: mod_base = OTHER; note = 2'-fluoroadenosine-3'-phosphate
  modified_base 5: mod_base = OTHER; note = 2'-O-methyladenosine-3'-phosphate
  modified_base 6: mod_base = OTHER; note = 2'-fluoroguanosine-3'-phosphate
  modified_base 7: mod_base = OTHER; note = 2'-O-methyladenosine-3'-phosphate
  modified_base 8: mod_base = OTHER; note = 2'-fluorouridine-3'-phosphate
  modified_base 9: mod_base = OTHER; note = 2'-O-methyladenosine-3'-phosphate
  modified_base 10: mod_base = OTHER; note = 2'-fluoroadenosine-3'-phosphate
  modified_base 11: mod_base = OTHER; note = 2'-O-methyladenosine-3'-phosphate
  modified_base 12: mod_base = OTHER; note = 2'-O-methyluridine-3'-phosphate
  modified_base 13: mod_base = OTHER; note = 2'-O-methylguanosine-3'-phosphate
  modified_base 14: mod_base = OTHER; note = 2'-fluorouridine-3'-phosphate
  modified_base 15: mod_base = OTHER; note = 2'-O-methylcytidine-3'-phosphate
  modified_base 16: mod_base = OTHER; note = 2'-fluorouridine-3'-phosphate
  modified_base 17: mod_base = OTHER; note = 2'-O-methylguanosine-3'-phosphate
  modified_base 18: mod_base = OTHER; note = 2'-fluorocytidine-3'-phosphate
  modified_base 19: mod_base = OTHER; note = 2'-O-methyluridine-3'-phosphate
  modified_base 20: mod_base = OTHER; note = 2'-fluorouridine-3'-phosphate
  modified_base 21: mod_base = OTHER; note = 2'-O-methylguanosine-3'-phosphorothioate
  modified_base 22: mod_base = OTHER; note = 2'-fluorocytidine-3'-phosphorothioate
  modified_base 23: mod_base = OTHER; note = 2'-O-methyluridine-3'-phosphate
aaaaagataaatgtctgcttgct

SEQ ID NO: 129 - RNA, 21 nt, synthetic construct
  source 1..21: mol_type = other RNA; note = Description of Artificial Sequence: Synthetic oligonucleotide
  modified_base 1: mod_base = OTHER; note = 2'-fluorocytidine-3'-phosphate
  modified_base 2: mod_base = OTHER; note = 2'-O-methyladenosine-3'-phosphate
  modified_base 3: mod_base = OTHER; note = 2'-fluoroadenosine-3'-phosphate
  modified_base 4: mod_base = OTHER; note = 2'-O-methylguanosine-3'-phosphate
  modified_base 5: mod_base = OTHER; note = 2'-fluorocytidine-3'-phosphate
  modified_base 6: mod_base = OTHER; note = 2'-O-methyladenosine-3'-phosphate
  modified_base 7: mod_base = OTHER; note = 2'-fluoroguanosine-3'-phosphate
  modified_base 8: mod_base = OTHER; note = 2'-O-methyladenosine-3'-phosphate
  modified_base 9: mod_base = OTHER; note = 2'-fluorocytidine-3'-phosphate
  modified_base 10: mod_base = OTHER; note = 2'-fluoroadenosine-3'-phosphate
  modified_base 11: mod_base = OTHER; note = 2'-fluorouridine-3'-phosphate
  modified_base 12: mod_base = OTHER; note = 2'-fluorouridine-3'-phosphate
  modified_base 13: mod_base = OTHER; note = 2'-fluorouridine-3'-phosphate
  modified_base 14: mod_base = OTHER; note = 2'-O-methyladenosine-3'-phosphate
  modified_base 15: mod_base = OTHER; note = 2'-fluorouridine-3'-phosphate
  modified_base 16: mod_base = OTHER; note = 2'-O-methylcytidine-3'-phosphate
  modified_base 17: mod_base = OTHER; note = 2'-fluorouridine-3'-phosphate
  modified_base 18: mod_base = OTHER; note = 2'-O-methyluridine-3'-phosphate
  modified_base 19: mod_base = OTHER; note = 2'-fluorouridine-3'-phosphate
  modified_base 20: mod_base = OTHER; note = 2'-O-methyluridine-3'-phosphate
  modified_base 21: mod_base = OTHER; note = 2'-fluorouridine-3'-phosphate N-[tris(GalNAc-alkyl)-amidodecanoyl)]-4-hydroxyprolinol Hyp-(GalNAc-alkyl)3
caagcagacatttatcttttt

SEQ ID NO: 130 - RNA, 23 nt, synthetic construct
  source 1..23: mol_type = other RNA; note = Description of Artificial Sequence: Synthetic oligonucleotide
  modified_base 1: mod_base = OTHER; note = 2'-O-methyladenosine-3'-phosphate
  modified_base 2: mod_base = OTHER; note = 2'-fluoroadenosine-3'-phosphate
  modified_base 3: mod_base = OTHER; note = 2'-O-methyladenosine-3'-phosphate
  modified_base 4: mod_base = OTHER; note = 2'-fluoroadenosine-3'-phosphate
  modified_base 5: mod_base = OTHER; note = 2'-O-methyladenosine-3'-phosphate
  modified_base 6: mod_base = OTHER; note = 2'-fluoroguanosine-3'-phosphate
  modified_base 7: mod_base = OTHER; note = 2'-O-methyladenosine-3'-phosphate
  modified_base 8: mod_base = OTHER; note = 2'-fluorouridine-3'-phosphate
  modified_base 9: mod_base = OTHER; note = 2'-O-methyladenosine-3'-phosphate
  modified_base 10: mod_base = OTHER; note = 2'-fluoroadenosine-3'-phosphate
  modified_base 11: mod_base = OTHER; note = 2'-O-methyladenosine-3'-phosphate
  modified_base 12: mod_base = OTHER; note = 2'-O-methyluridine-3'-phosphate
  modified_base 13: mod_base = OTHER; note = 2'-O-methylguanosine-3'-phosphate
  modified_base 14: mod_base = OTHER; note = 2'-fluorouridine-3'-phosphate
  modified_base 15: mod_base = OTHER; note = 2'-O-methylcytidine-3'-phosphate
  modified_base 16: mod_base = OTHER; note = 2'-fluorouridine-3'-phosphate
  modified_base 17: mod_base = OTHER; note = 2'-O-methylguanosine-3'-phosphate
  modified_base 18: mod_base = OTHER; note = 2'-fluorocytidine-3'-phosphate
  modified_base 19: mod_base = OTHER; note = 2'-O-methyluridine-3'-phosphate
  modified_base 20: mod_base = OTHER; note = 2'-fluorouridine-3'-phosphate
  modified_base 21: mod_base = OTHER; note = 2'-O-methylguanosine-3'-phosphorothioate
  modified_base 22: mod_base = OTHER; note = 2'-fluorocytidine-3'-phosphorothioate
  modified_base 23: mod_base = OTHER; note = 2'-O-methyluridine-3'-phosphate
aaaaagataaatgtctgcttgct

SEQ ID NO: 131 - RNA, 21 nt, synthetic construct
  source 1..21: mol_type = other RNA; note = Description of Artificial Sequence: Synthetic oligonucleotide
  modified_base 1: mod_base = OTHER; note = 2'-fluorocytidine-3'-phosphate
  modified_base 2: mod_base = OTHER; note = 2'-O-methyladenosine-3'-phosphate
  modified_base 3: mod_base = OTHER; note = 2'-fluoroadenosine-3'-phosphate
  modified_base 4: mod_base = OTHER; note = 2'-O-methylguanosine-3'-phosphate
  modified_base 5: mod_base = OTHER; note = 2'-fluorocytidine-3'-phosphate
  modified_base 6: mod_base = OTHER; note = 2'-O-methyladenosine-3'-phosphate
  modified_base 7: mod_base = OTHER; note = 2'-fluoroguanosine-3'-phosphate
  modified_base 8: mod_base = OTHER; note = 2'-fluoroadenosine-3'-phosphate
  modified_base 9: mod_base = OTHER; note = 2'-fluorocytidine-3'-phosphate
  modified_base 10: mod_base = OTHER; note = 2'-fluoroadenosine-3'-phosphate
  modified_base 11: mod_base = OTHER; note = 2'-fluorouridine-3'-phosphate
  modified_base 12: mod_base = OTHER; note = 2'-O-methyluridine-3'-phosphate
  modified_base 13: mod_base = OTHER; note = 2'-fluorouridine-3'-phosphate
  modified_base 14: mod_base = OTHER; note = 2'-O-methyladenosine-3'-phosphate
  modified_base 15: mod_base = OTHER; note = 2'-fluorouridine-3'-phosphate
  modified_base 16: mod_base = OTHER; note = 2'-O-methylcytidine-3'-phosphate
  modified_base 17: mod_base = OTHER; note = 2'-fluorouridine-3'-phosphate
  modified_base 18: mod_base = OTHER; note = 2'-O-methyluridine-3'-phosphate
  modified_base 19: mod_base = OTHER; note = 2'-fluorouridine-3'-phosphate
  modified_base 20: mod_base = OTHER; note = 2'-O-methyluridine-3'-phosphate
  modified_base 21: mod_base = OTHER; note = 2'-fluorouridine-3'-phosphate N-[tris(GalNAc-alkyl)-amidodecanoyl)]-4-hydroxyprolinol Hyp-(GalNAc-alkyl)3
caagcagacatttatcttttt

SEQ ID NO: 132 - RNA, 23 nt, synthetic construct
  source 1..23: mol_type = other RNA; note = Description of Artificial Sequence: Synthetic oligonucleotide
  modified_base 1: mod_base = OTHER; note = 2'-O-methyladenosine-3'-phosphate
  modified_base 2: mod_base = OTHER; note = 2'-fluoroadenosine-3'-phosphate
  modified_base 3: mod_base = OTHER; note = 2'-O-methyladenosine-3'-phosphate
  modified_base 4: mod_base = OTHER; note = 2'-fluoroadenosine-3'-phosphate
  modified_base 5: mod_base = OTHER; note = 2'-O-methyladenosine-3'-phosphate
  modified_base 6: mod_base = OTHER; note = 2'-fluoroguanosine-3'-phosphate
  modified_base 7: mod_base = OTHER; note = 2'-O-methyladenosine-3'-phosphate
  modified_base 8: mod_base = OTHER; note = 2'-fluorouridine-3'-phosphate
  modified_base 9: mod_base = OTHER; note = 2'-O-methyladenosine-3'-phosphate
  modified_base 10: mod_base = OTHER; note = 2'-fluoroadenosine-3'-phosphate
  modified_base 11: mod_base = OTHER; note = 2'-O-methyladenosine-3'-phosphate
  modified_base 12: mod_base = OTHER; note = 2'-O-methyluridine-3'-phosphate
  modified_base 13: mod_base = OTHER; note = 2'-O-methylguanosine-3'-phosphate
  modified_base 14: mod_base = OTHER; note = 2'-fluorouridine-3'-phosphate
  modified_base 15: mod_base = OTHER; note = 2'-O-methylcytidine-3'-phosphate
  modified_base 16: mod_base = OTHER; note = 2'-fluorouridine-3'-phosphate
  modified_base 17: mod_base = OTHER; note = 2'-O-methylguanosine-3'-phosphate
  modified_base 18: mod_base = OTHER; note = 2'-fluorocytidine-3'-phosphate
  modified_base 19: mod_base = OTHER; note = 2'-O-methyluridine-3'-phosphate
  modified_base 20: mod_base = OTHER; note = 2'-fluorouridine-3'-phosphate
  modified_base 21: mod_base = OTHER; note = 2'-O-methylguanosine-3'-phosphorothioate
  modified_base 22: mod_base = OTHER; note = 2'-fluorocytidine-3'-phosphorothioate
  modified_base 23: mod_base = OTHER; note = 2'-O-methyluridine-3'-phosphate
aaaaagataaatgtctgcttgct

SEQ ID NO: 133 - RNA, 21 nt, synthetic construct
  source 1..21: mol_type = other RNA; note = Description of Artificial Sequence: Synthetic oligonucleotide
  modified_base 1: mod_base = OTHER; note = 2'-fluorocytidine-3'-phosphate
  modified_base 2: mod_base = OTHER; note = 2'-O-methyladenosine-3'-phosphate
  modified_base 3: mod_base = OTHER; note = 2'-fluoroadenosine-3'-phosphate
  modified_base 4: mod_base = OTHER; note = 2'-O-methylguanosine-3'-phosphate
  modified_base 5: mod_base = OTHER; note = 2'-fluorocytidine-3'-phosphate
  modified_base 6: mod_base = OTHER; note = 2'-fluoroadenosine-3'-phosphate
  modified_base 7: mod_base = OTHER; note = 2'-fluoroguanosine-3'-phosphate
  modified_base 8: mod_base = OTHER; note = 2'-fluoroadenosine-3'-phosphate
  modified_base 9: mod_base = OTHER; note = 2'-fluorocytidine-3'-phosphate
  modified_base 10: mod_base = OTHER; note = 2'-fluoroadenosine-3'-phosphate
  modified_base 11: mod_base = OTHER; note = 2'-fluorouridine-3'-phosphate
  modified_base 12: mod_base = OTHER; note = 2'-O-methyluridine-3'-phosphate
  modified_base 13: mod_base = OTHER; note = 2'-fluorouridine-3'-phosphate
  modified_base 14: mod_base = OTHER; note = 2'-O-methyladenosine-3'-phosphate
  modified_base 15: mod_base = OTHER; note = 2'-fluorouridine-3'-phosphate
  modified_base 16: mod_base = OTHER; note = 2'-O-methylcytidine-3'-phosphate
  modified_base 17: mod_base = OTHER; note = 2'-fluorouridine-3'-phosphate
  modified_base 18: mod_base = OTHER; note = 2'-O-methyluridine-3'-phosphate
  modified_base 19: mod_base = OTHER; note = 2'-fluorouridine-3'-phosphate
  modified_base 20: mod_base = OTHER; note = 2'-O-methyluridine-3'-phosphate
  modified_base 21: mod_base = OTHER; note = 2'-fluorouridine-3'-phosphate N-[tris(GalNAc-alkyl)-amidodecanoyl)]-4-hydroxyprolinol Hyp-(GalNAc-alkyl)3
caagcagacatttatcttttt

SEQ ID NO: 134 - RNA, 23 nt, synthetic construct
  source 1..23: mol_type = other RNA; note = Description of Artificial Sequence: Synthetic oligonucleotide
  modified_base 1: mod_base = OTHER; note = 2'-O-methyladenosine-3'-phosphate
  modified_base 2: mod_base = OTHER; note = 2'-fluoroadenosine-3'-phosphate
  modified_base 3: mod_base = OTHER; note = 2'-O-methyladenosine-3'-phosphate
  modified_base 4: mod_base = OTHER; note = 2'-fluoroadenosine-3'-phosphate
  modified_base 5: mod_base = OTHER; note = 2'-O-methyladenosine-3'-phosphate
  modified_base 6: mod_base = OTHER; note = 2'-fluoroguanosine-3'-phosphate
  modified_base 7: mod_base = OTHER; note = 2'-O-methyladenosine-3'-phosphate
  modified_base 8: mod_base = OTHER; note = 2'-fluorouridine-3'-phosphate
  modified_base 9: mod_base = OTHER; note = 2'-O-methyladenosine-3'-phosphate
  modified_base 10: mod_base = OTHER; note = 2'-fluoroadenosine-3'-phosphate
  modified_base 11: mod_base = OTHER; note = 2'-O-methyladenosine-3'-phosphate
  modified_base 12: mod_base = OTHER; note = 2'-O-methyluridine-3'-phosphate
  modified_base 13: mod_base = OTHER; note = 2'-O-methylguanosine-3'-phosphate
  modified_base 14: mod_base = OTHER; note = 2'-fluorouridine-3'-phosphate
  modified_base 15: mod_base = OTHER; note = 2'-O-methylcytidine-3'-phosphate
  modified_base 16: mod_base = OTHER; note = 2'-fluorouridine-3'-phosphate
  modified_base 17: mod_base = OTHER; note = 2'-O-methylguanosine-3'-phosphate
  modified_base 18: mod_base = OTHER; note = 2'-fluorocytidine-3'-phosphate
  modified_base 19: mod_base = OTHER; note = 2'-O-methyluridine-3'-phosphate
  modified_base 20: mod_base = OTHER; note = 2'-fluorouridine-3'-phosphate
  modified_base 21: mod_base = OTHER; note = 2'-O-methylguanosine-3'-phosphorothioate
  modified_base 22: mod_base = OTHER; note = 2'-fluorocytidine-3'-phosphorothioate
  modified_base 23: mod_base = OTHER; note = 2'-O-methyluridine-3'-phosphate
aaaaagataaatgtctgcttgct

SEQ ID NO: 135 - RNA, 21 nt, synthetic construct
  source 1..21: mol_type = other RNA; note = Description of Artificial Sequence: Synthetic oligonucleotide
  modified_base 1: mod_base = OTHER; note = 2'-fluorocytidine-3'-phosphate
  modified_base 2: mod_base = OTHER; note = 2'-fluoroadenosine-3'-phosphate
  modified_base 3: mod_base = OTHER; note = 2'-fluoroadenosine-3'-phosphate
  modified_base 4: mod_base = OTHER; note = 2'-O-methylguanosine-3'-phosphate
  modified_base 5: mod_base = OTHER; note = 2'-fluorocytidine-3'-phosphate
  modified_base 6: mod_base = OTHER; note = 2'-O-methyladenosine-3'-phosphate
  modified_base 7: mod_base = OTHER; note = 2'-fluoroguanosine-3'-phosphate
  modified_base 8: mod_base = OTHER; note = 2'-O-methyladenosine-3'-phosphate
  modified_base 9: mod_base = OTHER; note = 2'-fluorocytidine-3'-phosphate
  modified_base 10: mod_base = OTHER; note = 2'-fluoroadenosine-3'-phosphate
  modified_base 11: mod_base = OTHER; note = 2'-fluorouridine-3'-phosphate
  modified_base 12: mod_base = OTHER; note = 2'-O-methyluridine-3'-phosphate
  modified_base 13: mod_base = OTHER; note = 2'-fluorouridine-3'-phosphate
  modified_base 14: mod_base = OTHER; note = 2'-O-methyladenosine-3'-phosphate
  modified_base 15: mod_base = OTHER; note = 2'-fluorouridine-3'-phosphate
  modified_base 16: mod_base = OTHER; note = 2'-O-methylcytidine-3'-phosphate
  modified_base 17: mod_base = OTHER; note = 2'-fluorouridine-3'-phosphate
  modified_base 18: mod_base = OTHER; note = 2'-O-methyluridine-3'-phosphate
  modified_base 19: mod_base = OTHER; note = 2'-fluorouridine-3'-phosphate
  modified_base 20: mod_base = OTHER; note = 2'-O-methyluridine-3'-phosphate
  modified_base 21: mod_base = OTHER; note = 2'-fluorouridine-3'-phosphate N-[tris(GalNAc-alkyl)-amidodecanoyl)]-4-hydroxyprolinol Hyp-(GalNAc-alkyl)3
caagcagacatttatcttttt

SEQ ID NO: 136 - RNA, 23 nt, synthetic construct
  source 1..23: mol_type = other RNA; note = Description of Artificial Sequence: Synthetic oligonucleotide
  modified_base 1: mod_base = OTHER; note = 2'-O-methyladenosine-3'-phosphate
  modified_base 2: mod_base = OTHER; note = 2'-fluoroadenosine-3'-phosphate
  modified_base 3: mod_base = OTHER; note = 2'-O-methyladenosine-3'-phosphate
  modified_base 4: mod_base = OTHER; note = 2'-fluoroadenosine-3'-phosphate
  modified_base 5: mod_base = OTHER; note = 2'-O-methyladenosine-3'-phosphate
  modified_base 6: mod_base = OTHER; note = 2'-fluoroguanosine-3'-phosphate
  modified_base 7: mod_base = OTHER; note = 2'-O-methyladenosine-3'-phosphate
  modified_base 8: mod_base = OTHER; note = 2'-fluorouridine-3'-phosphate
  modified_base 9: mod_base = OTHER; note = 2'-O-methyladenosine-3'-phosphate
  modified_base 10: mod_base = OTHER; note = 2'-fluoroadenosine-3'-phosphate
  modified_base 11: mod_base = OTHER; note = 2'-O-methyladenosine-3'-phosphate
  modified_base 12: mod_base = OTHER; note = 2'-O-methyluridine-3'-phosphate
  modified_base 13: mod_base = OTHER; note = 2'-O-methylguanosine-3'-phosphate
  modified_base 14: mod_base = OTHER; note = 2'-fluorouridine-3'-phosphate
  modified_base 15: mod_base = OTHER; note = 2'-O-methylcytidine-3'-phosphate
  modified_base 16: mod_base = OTHER; note = 2'-fluorouridine-3'-phosphate
  modified_base 17: mod_base = OTHER; note = 2'-O-methylguanosine-3'-phosphate
  modified_base 18: mod_base = OTHER; note = 2'-fluorocytidine-3'-phosphate
  modified_base 19: mod_base = OTHER; note = 2'-O-methyluridine-3'-phosphate
  modified_base 20: mod_base = OTHER; note = 2'-fluorouridine-3'-phosphate
  modified_base 21: mod_base = OTHER; note = 2'-O-methylguanosine-3'-phosphorothioate
  modified_base 22: mod_base = OTHER; note = 2'-fluorocytidine-3'-phosphorothioate
  modified_base 23: mod_base = OTHER; note = 2'-O-methyluridine-3'-phosphate
aaaaagataaatgtctgcttgct

SEQ ID NO: 137 - RNA, 21 nt, synthetic construct
  source 1..21: mol_type = other RNA; note = Description of Artificial Sequence: Synthetic oligonucleotide
  modified_base 1: mod_base = OTHER; note = 2'-fluorocytidine-3'-phosphate
  modified_base 2: mod_base = OTHER; note = 2'-fluoroadenosine-3'-phosphate
  modified_base 3: mod_base = OTHER; note = 2'-fluoroadenosine-3'-phosphate
  modified_base 4: mod_base = OTHER; note = 2'-O-methylguanosine-3'-phosphate
  modified_base 5: mod_base = OTHER; note = 2'-fluorocytidine-3'-phosphate
  modified_base 6: mod_base = OTHER; note = 2'-O-methyladenosine-3'-phosphate
  modified_base 7: mod_base = OTHER; note = 2'-fluoroguanosine-3'-phosphate
  modified_base 8: mod_base = OTHER; note = 2'-O-methyladenosine-3'-phosphate
  modified_base 9: mod_base = OTHER; note = 2'-fluorocytidine-3'-phosphate
  modified_base 10: mod_base = OTHER; note = 2'-fluoroadenosine-3'-phosphate
  modified_base 11: mod_base = OTHER; note = 2'-fluorouridine-3'-phosphate
  modified_base 12: mod_base = OTHER; note = 2'-O-methyluridine-3'-phosphate
  modified_base 13: mod_base = OTHER; note = 2'-fluorouridine-3'-phosphate
  modified_base 14: mod_base = OTHER; note = 2'-O-methyladenosine-3'-phosphate
  modified_base 15: mod_base = OTHER; note = 2'-fluorouridine-3'-phosphate
  modified_base 16: mod_base = OTHER; note = 2'-O-methylcytidine-3'-phosphate
  modified_base 17: mod_base = OTHER; note = 2'-fluorouridine-3'-phosphate
  modified_base 18: mod_base = OTHER; note = 2'-O-methyluridine-3'-phosphate
  modified_base 19: mod_base = OTHER; note = 2'-fluorouridine-3'-phosphate
  modified_base 20: mod_base = OTHER; note = 2'-O-methyluridine-3'-phosphate
  modified_base 21: mod_base = OTHER; note = 2'-fluorouridine-3'-phosphate N-[tris(GalNAc-alkyl)-amidodecanoyl)]-4-hydroxyprolinol Hyp-(GalNAc-alkyl)3
caagcagacatttatcttttt

SEQ ID NO: 138 - RNA, 23 nt, synthetic construct
  source 1..23: mol_type = other RNA; note = Description of Artificial Sequence: Synthetic oligonucleotide
  modified_base 1: mod_base = OTHER; note = 2'-O-methyladenosine-3'-phosphate
  modified_base 2: mod_base = OTHER; note = 2'-fluoroadenosine-3'-phosphate
  modified_base 3: mod_base = OTHER; note = 2'-O-methyladenosine-3'-phosphate
  modified_base 4: mod_base = OTHER; note = 2'-fluoroadenosine-3'-phosphate
  modified_base 5: mod_base = OTHER; note = 2'-O-methyladenosine-3'-phosphate
  modified_base 6: mod_base = OTHER; note = 2'-fluoroguanosine-3'-phosphate
  modified_base 7: mod_base = OTHER; note = 2'-O-methyladenosine-3'-phosphate
  modified_base 8: mod_base = OTHER; note = 2'-fluorouridine-3'-phosphate
  modified_base 9: mod_base = OTHER; note = 2'-O-methyladenosine-3'-phosphate
  modified_base 10: mod_base = OTHER; note = 2'-fluoroadenosine-3'-phosphate
  modified_base 11: mod_base = OTHER; note = 2'-O-methyladenosine-3'-phosphate
  modified_base 12: mod_base = OTHER; note = 2'-O-methyluridine-3'-phosphate
  modified_base 13: mod_base = OTHER; note = 2'-O-methylguanosine-3'-phosphate
  modified_base 14: mod_base = OTHER; note = 2'-fluorouridine-3'-phosphate
  modified_base 15: mod_base = OTHER; note = 2'-O-methylcytidine-3'-phosphate
  modified_base 16: mod_base = OTHER; note = 2'-fluorouridine-3'-phosphate
  modified_base 17: mod_base = OTHER; note = 2'-O-methylguanosine-3'-phosphate
  modified_base 18: mod_base = OTHER; note = 2'-fluorocytidine-3'-phosphate
  modified_base 19: mod_base = OTHER; note = 2'-O-methyluridine-3'-phosphate
  modified_base 20: mod_base = OTHER; note = 2'-fluorouridine-3'-phosphate
  modified_base 21: mod_base = OTHER; note = 2'-O-methylguanosine-3'-phosphorothioate
  modified_base 22: mod_base = OTHER; note = 2'-fluorocytidine-3'-phosphorothioate
  modified_base 23: mod_base = OTHER; note = 2'-O-methyluridine-3'-phosphate
aaaaagataaatgtctgcttgct

SEQ ID NO: 139 - RNA, 21 nt, synthetic construct
  source 1..21: mol_type = other RNA; note = Description of Artificial Sequence: Synthetic oligonucleotide
  modified_base 1: mod_base = OTHER; note = 2'-fluorocytidine-3'-phosphate
  modified_base 2: mod_base = OTHER; note = 2'-O-methyladenosine-3'-phosphate
  modified_base 3: mod_base = OTHER; note = 2'-fluoroadenosine-3'-phosphate
  modified_base 4: mod_base = OTHER; note = 2'-O-methylguanosine-3'-phosphate
  modified_base 5: mod_base = OTHER; note = 2'-fluorocytidine-3'-phosphate
  modified_base 6: mod_base = OTHER; note = 2'-O-methyladenosine-3'-phosphate
  modified_base 7: mod_base = OTHER; note = 2'-fluoroguanosine-3'-phosphate
  modified_base 8: mod_base = OTHER; note = 2'-O-methyladenosine-3'-phosphate
  modified_base 9: mod_base = OTHER; note = 2'-fluorocytidine-3'-phosphate
  modified_base 10: mod_base = OTHER; note = 2'-fluoroadenosine-3'-phosphate
  modified_base 11: mod_base = OTHER; note = 2'-fluorouridine-3'-phosphate
  modified_base 12: mod_base = OTHER; note = 2'-O-methyluridine-3'-phosphate
  modified_base 13: mod_base = OTHER; note = 2'-fluorouridine-3'-phosphate
  modified_base 14: mod_base = OTHER; note = 2'-O-methyladenosine-3'-phosphate
  modified_base 15: mod_base = OTHER; note = 2'-fluorouridine-3'-phosphate
  modified_base 16: mod_base = OTHER; note = 2'-O-methylcytidine-3'-phosphate
  modified_base 17: mod_base = OTHER; note = 2'-O-methyluridine-3'-phosphate
  modified_base 18: mod_base = OTHER; note = 2'-O-methyluridine-3'-phosphate
  modified_base 19: mod_base = OTHER; note = 2'-fluorouridine-3'-phosphate
  modified_base 20: mod_base = OTHER; note = 2'-O-methyluridine-3'-phosphate
  modified_base 21: mod_base = OTHER; note = 2'-fluorouridine-3'-phosphate N-[tris(GalNAc-alkyl)-amidodecanoyl)]-4-hydroxyprolinol Hyp-(GalNAc-alkyl)3
caagcagacatttatcttttt

SEQ ID NO: 140 - RNA, 23 nt, synthetic construct
  source 1..23: mol_type = other RNA; note = Description of Artificial Sequence: Synthetic oligonucleotide
  modified_base 1: mod_base = OTHER; note = 2'-O-methyladenosine-3'-phosphate
  modified_base 2: mod_base = OTHER; note = 2'-fluoroadenosine-3'-phosphate
  modified_base 3: mod_base = OTHER; note = 2'-O-methyladenosine-3'-phosphate
  modified_base 4: mod_base = OTHER; note = 2'-fluoroadenosine-3'-phosphate
  modified_base 5: mod_base = OTHER; note = 2'-O-methyladenosine-3'-phosphate
  modified_base 6: mod_base = OTHER; note = 2'-fluoroguanosine-3'-phosphate
  modified_base 7: mod_base = OTHER; note = 2'-O-methyladenosine-3'-phosphate
  modified_base 8: mod_base = OTHER; note = 2'-fluorouridine-3'-phosphate
  modified_base 9: mod_base = OTHER; note = 2'-O-methyladenosine-3'-phosphate
  modified_base 10: mod_base = OTHER; note = 2'-fluoroadenosine-3'-phosphate
  modified_base 11: mod_base = OTHER; note = 2'-O-methyladenosine-3'-phosphate
  modified_base 12: mod_base = OTHER; note = 2'-O-methyluridine-3'-phosphate
  modified_base 13: mod_base = OTHER; note = 2'-O-methylguanosine-3'-phosphate
  modified_base 14: mod_base = OTHER; note = 2'-fluorouridine-3'-phosphate
  modified_base 15: mod_base = OTHER; note = 2'-O-methylcytidine-3'-phosphate
  modified_base 16: mod_base = OTHER; note = 2'-fluorouridine-3'-phosphate
  modified_base 17: mod_base = OTHER; note = 2'-O-methylguanosine-3'-phosphate
  modified_base 18: mod_base = OTHER; note = 2'-fluorocytidine-3'-phosphate
  modified_base 19: mod_base = OTHER; note = 2'-O-methyluridine-3'-phosphate
  modified_base 20: mod_base = OTHER; note = 2'-fluorouridine-3'-phosphate
  modified_base 21: mod_base = OTHER; note = 2'-O-methylguanosine-3'-phosphorothioate
  modified_base 22: mod_base = OTHER; note = 2'-fluorocytidine-3'-phosphorothioate
  modified_base 23: mod_base = OTHER; note = 2'-O-methyluridine-3'-phosphate
aaaaagataaatgtctgcttgct

SEQ ID NO: 141 - RNA, 21 nt, synthetic construct
  source 1..21: mol_type = other RNA; note = Description of Artificial Sequence: Synthetic oligonucleotide
  modified_base 1: mod_base = OTHER; note = 2'-fluorocytidine-3'-phosphate
  modified_base 2: mod_base = OTHER; note = 2'-O-methyladenosine-3'-phosphate
  modified_base 3: mod_base = OTHER; note = 2'-fluoroadenosine-3'-phosphate
  modified_base 4: mod_base = OTHER; note = 2'-O-methylguanosine-3'-phosphate
  modified_base 5: mod_base = OTHER; note = 2'-fluorocytidine-3'-phosphate
  modified_base 6: mod_base = OTHER; note = 2'-O-methyladenosine-3'-phosphate
  modified_base 7: mod_base = OTHER; note = 2'-fluoroguanosine-3'-phosphate
  modified_base 8: mod_base = OTHER; note = 2'-O-methyladenosine-3'-phosphate
  modified_base 9: mod_base = OTHER; note = 2'-fluorocytidine-3'-phosphate
  modified_base 10: mod_base = OTHER; note = 2'-fluoroadenosine-3'-phosphate
  modified_base 11: mod_base = OTHER; note = 2'-fluorouridine-3'-phosphate
  modified_base 12: mod_base = OTHER; note = 2'-O-methyluridine-3'-phosphate
  modified_base 13: mod_base = OTHER; note = 2'-O-methyluridine-3'-phosphate
  modified_base 14: mod_base = OTHER; note = 2'-O-methyladenosine-3'-phosphate
  modified_base 15: mod_base = OTHER; note = 2'-fluorouridine-3'-phosphate
  modified_base 16: mod_base = OTHER; note = 2'-O-methylcytidine-3'-phosphate
  modified_base 17: mod_base = OTHER; note = 2'-fluorouridine-3'-phosphate
  modified_base 18: mod_base = OTHER; note = 2'-O-methyluridine-3'-phosphate
  modified_base 19: mod_base = OTHER; note = 2'-fluorouridine-3'-phosphate
  modified_base 20: mod_base = OTHER; note = 2'-O-methyluridine-3'-phosphate
  modified_base 21: mod_base = OTHER; note = 2'-fluorouridine-3'-phosphate N-[tris(GalNAc-alkyl)-amidodecanoyl)]-4-hydroxyprolinol Hyp-(GalNAc-alkyl)3
caagcagacatttatcttttt

SEQ ID NO: 142 - RNA, 23 nt, synthetic construct
  source 1..23: mol_type = other RNA; note = Description of Artificial Sequence: Synthetic oligonucleotide
  modified_base 1: mod_base = OTHER; note = 2'-O-methyladenosine-3'-phosphate
  modified_base 2: mod_base = OTHER; note = 2'-fluoroadenosine-3'-phosphate
  modified_base 3: mod_base = OTHER; note = 2'-O-methyladenosine-3'-phosphate
  modified_base 4: mod_base = OTHER; note = 2'-fluoroadenosine-3'-phosphate
  modified_base 5: mod_base = OTHER; note = 2'-O-methyladenosine-3'-phosphate
  modified_base 6: mod_base = OTHER; note = 2'-fluoroguanosine-3'-phosphate
  modified_base 7: mod_base = OTHER; note = 2'-O-methyladenosine-3'-phosphate
  modified_base 8: mod_base = OTHER; note = 2'-fluorouridine-3'-phosphate
  modified_base 9: mod_base = OTHER; note = 2'-O-methyladenosine-3'-phosphate
  modified_base 10: mod_base = OTHER; note = 2'-fluoroadenosine-3'-phosphate
  modified_base 11: mod_base = OTHER; note = 2'-O-methyladenosine-3'-phosphate
  modified_base 12: mod_base = OTHER; note = 2'-O-methyluridine-3'-phosphate
  modified_base 13: mod_base = OTHER; note = 2'-O-methylguanosine-3'-phosphate
  modified_base 14: mod_base = OTHER; note = 2'-fluorouridine-3'-phosphate
  modified_base 15: mod_base = OTHER; note = 2'-O-methylcytidine-3'-phosphate
  modified_base 16: mod_base = OTHER; note = 2'-fluorouridine-3'-phosphate
  modified_base 17: mod_base = OTHER; note = 2'-O-methylguanosine-3'-phosphate
  modified_base 18: mod_base = OTHER; note = 2'-fluorocytidine-3'-phosphate
  modified_base 19: mod_base = OTHER; note = 2'-O-methyluridine-3'-phosphate
  modified_base 20: mod_base = OTHER; note = 2'-fluorouridine-3'-phosphate
  modified_base 21: mod_base = OTHER; note = 2'-O-methylguanosine-3'-phosphorothioate
  modified_base 22: mod_base = OTHER; note = 2'-fluorocytidine-3'-phosphorothioate
  modified_base 23: mod_base = OTHER; note = 2'-O-methyluridine-3'-phosphate
aaaaagataaatgtctgcttgct

SEQ ID NO: 143 - RNA, 21 nt, synthetic construct
  source 1..21: mol_type = other RNA; note = Description of Artificial Sequence: Synthetic oligonucleotide
  modified_base 1: mod_base = OTHER; note = 2'-fluorocytidine-3'-phosphate
  modified_base 2: mod_base = OTHER; note = 2'-O-methyladenosine-3'-phosphate
  modified_base 3: mod_base = OTHER; note = 2'-fluoroadenosine-3'-phosphate
  modified_base 4: mod_base = OTHER; note = 2'-O-methylguanosine-3'-phosphate
  modified_base 5: mod_base = OTHER; note = 2'-fluorocytidine-3'-phosphate
  modified_base 6: mod_base = OTHER; note = 2'-O-methyladenosine-3'-phosphate
  modified_base 7: mod_base = OTHER; note = 2'-fluoroguanosine-3'-phosphate
  modified_base 8: mod_base = OTHER; note = 2'-O-methyladenosine-3'-phosphate
  modified_base 9: mod_base = OTHER; note = 2'-fluorocytidine-3'-phosphate
  modified_base 10: mod_base = OTHER; note = 2'-O-methyladenosine-3'-phosphate
  modified_base 11: mod_base = OTHER; note = 2'-O-methyluridine-3'-phosphate
  modified_base 12: mod_base = OTHER; note = 2'-O-methyluridine-3'-phosphate
  modified_base 13: mod_base = OTHER; note = 2'-fluorouridine-3'-phosphate
  modified_base 14: mod_base = OTHER; note = 2'-O-methyladenosine-3'-phosphate
  modified_base 15: mod_base = OTHER; note = 2'-fluorouridine-3'-phosphate
  modified_base 16: mod_base = OTHER; note = 2'-O-methylcytidine-3'-phosphate
  modified_base 17: mod_base = OTHER; note = 2'-fluorouridine-3'-phosphate
  modified_base 18: mod_base = OTHER; note = 2'-O-methyluridine-3'-phosphate
  modified_base 19: mod_base = OTHER; note = 2'-fluorouridine-3'-phosphate
  modified_base 20: mod_base = OTHER; note = 2'-O-methyluridine-3'-phosphate
  modified_base 21: mod_base = OTHER; note = 2'-fluorouridine-3'-phosphate N-[tris(GalNAc-alkyl)-amidodecanoyl)]-4-hydroxyprolinol Hyp-(GalNAc-alkyl)3
caagcagacatttatcttttt

SEQ ID NO: 144 - RNA, 23 nt, synthetic construct
  source 1..23: mol_type = other RNA; note = Description of Artificial Sequence: Synthetic oligonucleotide
  modified_base 1: mod_base = OTHER; note = 2'-O-methyladenosine-3'-phosphate
  modified_base 2: mod_base = OTHER; note = 2'-fluoroadenosine-3'-phosphate
  modified_base 3: mod_base = OTHER; note = 2'-O-methyladenosine-3'-phosphate
  modified_base 4: mod_base = OTHER; note = 2'-fluoroadenosine-3'-phosphate
  modified_base 5: mod_base = OTHER; note = 2'-O-methyladenosine-3'-phosphate
  modified_base 6: mod_base = OTHER; note = 2'-fluoroguanosine-3'-phosphate
  modified_base 7: mod_base = OTHER; note = 2'-O-methyladenosine-3'-phosphate
  modified_base 8: mod_base = OTHER; note = 2'-fluorouridine-3'-phosphate
  modified_base 9: mod_base = OTHER; note = 2'-O-methyladenosine-3'-phosphate
  modified_base 10: mod_base = OTHER; note = 2'-fluoroadenosine-3'-phosphate
  modified_base 11: mod_base = OTHER; note = 2'-O-methyladenosine-3'-phosphate
  modified_base 12: mod_base = OTHER; note = 2'-O-methyluridine-3'-phosphate
  modified_base 13: mod_base = OTHER; note = 2'-O-methylguanosine-3'-phosphate
  modified_base 14: mod_base = OTHER; note = 2'-fluorouridine-3'-phosphate
  modified_base 15: mod_base = OTHER; note = 2'-O-methylcytidine-3'-phosphate
  modified_base 16: mod_base = OTHER; note = 2'-fluorouridine-3'-phosphate
  modified_base 17: mod_base = OTHER; note = 2'-O-methylguanosine-3'-phosphate
  modified_base 18: mod_base = OTHER; note = 2'-fluorocytidine-3'-phosphate
  modified_base 19: mod_base = OTHER; note = 2'-O-methyluridine-3'-phosphate
  modified_base 20: mod_base = OTHER; note = 2'-fluorouridine-3'-phosphate
  modified_base 21: mod_base = OTHER; note = 2'-O-methylguanosine-3'-phosphorothioate
  modified_base 22: mod_base = OTHER; note = 2'-fluorocytidine-3'-phosphorothioate
  modified_base 23: mod_base = OTHER; note = 2'-O-methyluridine-3'-phosphate
aaaaagataaatgtctgcttgct

SEQ ID NO: 145 - RNA, 21 nt, synthetic construct
  source 1..21: mol_type = other RNA; note = Description of Artificial Sequence: Synthetic oligonucleotide
  modified_base 1: mod_base = OTHER; note = 2'-fluorocytidine-3'-phosphate
  modified_base 2: mod_base = OTHER; note = 2'-O-methyladenosine-3'-phosphate
  modified_base 3: mod_base = OTHER; note = 2'-fluoroadenosine-3'-phosphate
  modified_base 4: mod_base = OTHER; note = 2'-O-methylguanosine-3'-phosphate
  modified_base 5: mod_base = OTHER; note = 2'-fluorocytidine-3'-phosphate
  modified_base 6: mod_base = OTHER; note = 2'-O-methyladenosine-3'-phosphate
  modified_base 7: mod_base = OTHER; note = 2'-fluoroguanosine-3'-phosphate
  modified_base 8: mod_base = OTHER; note = 2'-O-methyladenosine-3'-phosphate
  modified_base 9: mod_base = OTHER; note = 2'-O-methylcytidine-3'-phosphate
  modified_base 10: mod_base = OTHER; note = 2'-O-methyladenosine-3'-phosphate
  modified_base 11: mod_base = OTHER; note = 2'-fluorouridine-3'-phosphate
  modified_base 12: mod_base = OTHER; note = 2'-O-methyluridine-3'-phosphate
  modified_base 13: mod_base = OTHER; note = 2'-fluorouridine-3'-phosphate
  modified_base 14: mod_base = OTHER; note = 2'-O-methyladenosine-3'-phosphate
  modified_base 15: mod_base = OTHER; note = 2'-fluorouridine-3'-phosphate
  modified_base 16: mod_base = OTHER; note = 2'-O-methylcytidine-3'-phosphate
  modified_base 17: mod_base = OTHER; note = 2'-fluorouridine-3'-phosphate
  modified_base 18: mod_base = OTHER; note = 2'-O-methyluridine-3'-phosphate
  modified_base 19: mod_base = OTHER; note = 2'-fluorouridine-3'-phosphate
  modified_base 20: mod_base = OTHER; note = 2'-O-methyluridine-3'-phosphate
  modified_base 21: mod_base = OTHER; note = 2'-fluorouridine-3'-phosphate N-[tris(GalNAc-alkyl)-amidodecanoyl)]-4-hydroxyprolinol Hyp-(GalNAc-alkyl)3
caagcagacatttatcttttt

SEQ ID NO: 146 - RNA, 23 nt, synthetic construct
  source 1..23: mol_type = other RNA; note = Description of Artificial Sequence: Synthetic oligonucleotide
  modified_base 1: mod_base = OTHER; note = 2'-O-methyladenosine-3'-phosphate
  modified_base 2: mod_base = OTHER; note = 2'-fluoroadenosine-3'-phosphate
  modified_base 3: mod_base = OTHER; note = 2'-O-methyladenosine-3'-phosphate
  modified_base 4: mod_base = OTHER; note = 2'-fluoroadenosine-3'-phosphate
  modified_base 5: mod_base = OTHER; note = 2'-O-methyladenosine-3'-phosphate
  modified_base 6: mod_base = OTHER; note = 2'-fluoroguanosine-3'-phosphate
  modified_base 7: mod_base = OTHER; note = 2'-O-methyladenosine-3'-phosphate
  modified_base 8: mod_base = OTHER; note = 2'-fluorouridine-3'-phosphate
  modified_base 9: mod_base = OTHER; note = 2'-O-methyladenosine-3'-phosphate
  modified_base 10: mod_base = OTHER; note = 2'-fluoroadenosine-3'-phosphate
  modified_base 11: mod_base = OTHER; note = 2'-O-methyladenosine-3'-phosphate
  modified_base 12: mod_base = OTHER; note = 2'-O-methyluridine-3'-phosphate
  modified_base 13: mod_base = OTHER; note = 2'-O-methylguanosine-3'-phosphate
  modified_base 14: mod_base = OTHER; note = 2'-fluorouridine-3'-phosphate
  modified_base 15: mod_base = OTHER; note = 2'-O-methylcytidine-3'-phosphate
  modified_base 16: mod_base = OTHER; note = 2'-fluorouridine-3'-phosphate
  modified_base 17: mod_base = OTHER; note = 2'-O-methylguanosine-3'-phosphate
  modified_base 18: mod_base = OTHER; note = 2'-fluorocytidine-3'-phosphate
  modified_base 19: mod_base = OTHER; note = 2'-O-methyluridine-3'-phosphate
  modified_base 20: mod_base = OTHER; note = 2'-fluorouridine-3'-phosphate
  modified_base 21: mod_base = OTHER; note = 2'-O-methylguanosine-3'-phosphorothioate
  modified_base 22: mod_base = OTHER; note = 2'-fluorocytidine-3'-phosphorothioate
  modified_base 23: mod_base = OTHER; note = 2'-O-methyluridine-3'-phosphate
aaaaagataaatgtctgcttgct

SEQ ID NO: 147 - RNA, 21 nt, synthetic construct
  source 1..21: mol_type = other RNA; note = Description of Artificial Sequence: Synthetic oligonucleotide
  modified_base 1: mod_base = OTHER; note = 2'-fluorocytidine-3'-phosphate
  modified_base 2: mod_base = OTHER; note = 2'-O-methyladenosine-3'-phosphate
  modified_base 3: mod_base = OTHER; note = 2'-fluoroadenosine-3'-phosphate
  modified_base 4: mod_base = OTHER; note = 2'-O-methylguanosine-3'-phosphate
  modified_base 5: mod_base = OTHER; note = 2'-fluorocytidine-3'-phosphate
  modified_base 6: mod_base = OTHER; note = 2'-O-methyladenosine-3'-phosphate
  modified_base 7: mod_base = OTHER; note = 2'-fluoroguanosine-3'-phosphate
  modified_base 8: mod_base = OTHER; note = 2'-O-methyladenosine-3'-phosphate
  modified_base 9: mod_base = OTHER; note = 2'-fluorocytidine-3'-phosphate
  modified_base 10: mod_base = OTHER; note = 2'-fluoroadenosine-3'-phosphate
  modified_base 11: mod_base = OTHER; note = 2'-fluorouridine-3'-phosphate
  modified_base 12: mod_base = OTHER; note = 2'-O-methyluridine-3'-phosphate
  modified_base 13: mod_base = OTHER; note = 2'-fluorouridine-3'-phosphate
  modified_base 14: mod_base = OTHER; note = 2'-O-methyladenosine-3'-phosphate
  modified_base 15: mod_base = OTHER; note = 2'-O-methyluridine-3'-phosphate
  modified_base 16: mod_base = OTHER; note = 2'-O-methylcytidine-3'-phosphate
  modified_base 17: mod_base = OTHER; note = 2'-fluorouridine-3'-phosphate
  modified_base 18: mod_base = OTHER; note = 2'-fluorouridine-3'-phosphate
  modified_base 19: mod_base = OTHER; note = 2'-fluorouridine-3'-phosphate
  modified_base 20: mod_base = OTHER; note = 2'-O-methyluridine-3'-phosphate
  modified_base 21: mod_base = OTHER; note = 2'-fluorouridine-3'-phosphate N-[tris(GalNAc-alkyl)-amidodecanoyl)]-4-hydroxyprolinol Hyp-(GalNAc-alkyl)3
caagcagacatttatcttttt

SEQ ID NO: 148 - RNA, 23 nt, synthetic construct
  source 1..23: mol_type = other RNA; note = Description of Artificial Sequence: Synthetic oligonucleotide
  modified_base 1: mod_base = OTHER; note = 2'-O-methyladenosine-3'-phosphate
  modified_base 2: mod_base = OTHER; note = 2'-fluoroadenosine-3'-phosphate
  modified_base 3: mod_base = OTHER; note = 2'-O-methyladenosine-3'-phosphate
  modified_base 4: mod_base = OTHER; note = 2'-fluoroadenosine-3'-phosphate
  modified_base 5: mod_base = OTHER; note = 2'-O-methyladenosine-3'-phosphate
  modified_base 6: mod_base = OTHER; note = 2'-fluoroguanosine-3'-phosphate
  modified_base 7: mod_base = OTHER; note = 2'-O-methyladenosine-3'-phosphate
  modified_base 8: mod_base = OTHER; note = 2'-fluorouridine-3'-phosphate
  modified_base 9: mod_base = OTHER; note = 2'-O-methyladenosine-3'-phosphate
  modified_base 10: mod_base = OTHER; note = 2'-fluoroadenosine-3'-phosphate
  modified_base 11: mod_base = OTHER; note = 2'-O-methyladenosine-3'-phosphate
  modified_base 12: mod_base = OTHER; note = 2'-O-methyluridine-3'-phosphate
  modified_base 13: mod_base = OTHER; note = 2'-O-methylguanosine-3'-phosphate
  modified_base 14: mod_base = OTHER; note = 2'-fluorouridine-3'-phosphate
  modified_base 15: mod_base = OTHER; note = 2'-O-methylcytidine-3'-phosphate
  modified_base 16: mod_base = OTHER; note = 2'-fluorouridine-3'-phosphate
  modified_base 17: mod_base = OTHER; note = 2'-O-methylguanosine-3'-phosphate
  modified_base 18: mod_base = OTHER; note = 2'-fluorocytidine-3'-phosphate
  modified_base 19: mod_base = OTHER; note = 2'-O-methyluridine-3'-phosphate
  modified_base 20: mod_base = OTHER; note = 2'-fluorouridine-3'-phosphate
  modified_base 21: mod_base = OTHER; note = 2'-O-methylguanosine-3'-phosphorothioate
  modified_base 22: mod_base = OTHER; note = 2'-fluorocytidine-3'-phosphorothioate
  modified_base 23: mod_base = OTHER; note = 2'-O-methyluridine-3'-phosphate
aaaaagataaatgtctgcttgct

SEQ ID NO: 149 - RNA, 21 nt, synthetic construct
  source 1..21: mol_type = other RNA; note = Description of Artificial Sequence: Synthetic oligonucleotide
  modified_base 1: mod_base = OTHER; note = 2'-fluorocytidine-3'-phosphate
  modified_base 2: mod_base = OTHER; note = 2'-O-methyladenosine-3'-phosphate
  modified_base 3: mod_base = OTHER; note = 2'-fluoroadenosine-3'-phosphate
  modified_base 4: mod_base = OTHER; note = 2'-O-methylguanosine-3'-phosphate
  modified_base 5: mod_base = OTHER; note = 2'-fluorocytidine-3'-phosphate
  modified_base 6: mod_base = OTHER; note = 2'-O-methyladenosine-3'-phosphate
  modified_base 7: mod_base = OTHER; note = 2'-fluoroguanosine-3'-phosphate
  modified_base 8: mod_base = OTHER; note = 2'-O-methyladenosine-3'-phosphate
  modified_base 9: mod_base = OTHER; note = 2'-fluorocytidine-3'-phosphate
  modified_base 10: mod_base = OTHER; note = 2'-fluoroadenosine-3'-phosphate
  modified_base 11: mod_base = OTHER; note = 2'-fluorouridine-3'-phosphate
  modified_base 12: mod_base = OTHER; note = 2'-O-methyluridine-3'-phosphate
  modified_base 13: mod_base = OTHER; note = 2'-O-methyluridine-3'-phosphate
  modified_base 14: mod_base = OTHER; note = 2'-O-methyladenosine-3'-phosphate
  modified_base 15: mod_base = OTHER; note = 2'-fluorouridine-3'-phosphate
  modified_base 16: mod_base = OTHER; note = 2'-O-methylcytidine-3'-phosphate
  modified_base 17: mod_base = OTHER; note = 2'-fluorouridine-3'-phosphate
  modified_base 18: mod_base = OTHER; note = 2'-fluorouridine-3'-phosphate
  modified_base 19: mod_base = OTHER; note = 2'-fluorouridine-3'-phosphate
  modified_base 20: mod_base = OTHER; note = 2'-O-methyluridine-3'-phosphate
  modified_base 21: mod_base = OTHER; note = 2'-fluorouridine-3'-phosphate N-[tris(GalNAc-alkyl)-amidodecanoyl)]-4-hydroxyprolinol Hyp-(GalNAc-alkyl)3
caagcagacatttatcttttt

SEQ ID NO: 150 - RNA, 23 nt, synthetic construct
  source 1..23: mol_type = other RNA; note = Description of Artificial Sequence: Synthetic oligonucleotide
  modified_base 1: mod_base = OTHER; note = 2'-O-methyladenosine-3'-phosphate
  modified_base 2: mod_base = OTHER; note = 2'-fluoroadenosine-3'-phosphate
  modified_base 3: mod_base = OTHER; note = 2'-O-methyladenosine-3'-phosphate
  modified_base 4: mod_base = OTHER; note = 2'-fluoroadenosine-3'-phosphate
  modified_base 5: mod_base = OTHER; note = 2'-O-methyladenosine-3'-phosphate
  modified_base 6: mod_base = OTHER; note = 2'-fluoroguanosine-3'-phosphate
  modified_base 7: mod_base = OTHER; note = 2'-O-methyladenosine-3'-phosphate
  modified_base 8: mod_base = OTHER; note = 2'-fluorouridine-3'-phosphate
  modified_base 9: mod_base = OTHER; note = 2'-O-methyladenosine-3'-phosphate
  modified_base 10: mod_base = OTHER; note = 2'-fluoroadenosine-3'-phosphate
  modified_base 11: mod_base = OTHER; note = 2'-O-methyladenosine-3'-phosphate
  modified_base 12: mod_base = OTHER; note = 2'-O-methyluridine-3'-phosphate
  modified_base 13: mod_base = OTHER; note = 2'-O-methylguanosine-3'-phosphate
  modified_base 14: mod_base = OTHER; note = 2'-fluorouridine-3'-phosphate
  modified_base 15: mod_base = OTHER; note = 2'-O-methylcytidine-3'-phosphate
  modified_base 16: mod_base = OTHER; note = 2'-fluorouridine-3'-phosphate
  modified_base 17: mod_base = OTHER; note = 2'-O-methylguanosine-3'-phosphate
  modified_base 18: mod_base = OTHER; note = 2'-fluorocytidine-3'-phosphate
  modified_base 19: mod_base = OTHER; note = 2'-O-methyluridine-3'-phosphate
  modified_base 20: mod_base = OTHER; note = 2'-fluorouridine-3'-phosphate
  modified_base 21: mod_base = OTHER; note = 2'-O-methylguanosine-3'-phosphorothioate
  modified_base 22: mod_base = OTHER; note = 2'-fluorocytidine-3'-phosphorothioate
  modified_base 23: mod_base = OTHER; note = 2'-O-methyluridine-3'-phosphate
aaaaagataaatgtctgcttgct

SEQ ID NO: 151 - RNA, 21 nt, synthetic construct
  source 1..21: mol_type = other RNA; note = Description of Artificial Sequence: Synthetic oligonucleotide
  modified_base 1: mod_base = OTHER; note = 2'-fluorocytidine-3'-phosphate
  modified_base 2: mod_base = OTHER; note = 2'-O-methyladenosine-3'-phosphate
  modified_base 3: mod_base = OTHER; note = 2'-fluoroadenosine-3'-phosphate
  modified_base 4: mod_base = OTHER; note = 2'-O-methylguanosine-3'-phosphate
  modified_base 5: mod_base = OTHER; note = 2'-fluorocytidine-3'-phosphate
  modified_base 6: mod_base = OTHER; note = 2'-O-methyladenosine-3'-phosphate
  modified_base 7: mod_base = OTHER; note = 2'-O-methylguanosine-3'-phosphate
  modified_base 8: mod_base = OTHER; note = 2'-O-methyladenosine-3'-phosphate
  modified_base 9: mod_base = OTHER; note = 2'-fluorocytidine-3'-phosphate
  modified_base 10: mod_base = OTHER; note = 2'-fluoroadenosine-3'-phosphate
  modified_base 11: mod_base = OTHER; note = 2'-fluorouridine-3'-phosphate
  modified_base 12: mod_base = OTHER; note = 2'-O-methyluridine-3'-phosphate
  modified_base 13: mod_base = OTHER; note = 2'-fluorouridine-3'-phosphate
  modified_base 14: mod_base = OTHER; note = 2'-O-methyladenosine-3'-phosphate
  modified_base 15: mod_base = OTHER; note = 2'-fluorouridine-3'-phosphate
  modified_base 16: mod_base = OTHER; note = 2'-O-methylcytidine-3'-phosphate
  modified_base 17: mod_base = OTHER; note = 2'-fluorouridine-3'-phosphate
  modified_base 18: mod_base = OTHER; note = 2'-fluorouridine-3'-phosphate
  modified_base 19: mod_base = OTHER; note = 2'-fluorouridine-3'-phosphate
  modified_base 20: mod_base = OTHER; note = 2'-O-methyluridine-3'-phosphate
  modified_base 21: mod_base = OTHER; note = 2'-fluorouridine-3'-phosphate N-[tris(GalNAc-alkyl)-amidodecanoyl)]-4-hydroxyprolinol Hyp-(GalNAc-alkyl)3
caagcagacatttatcttttt

SEQ ID NO: 152 - RNA, 23 nt, synthetic construct
  source 1..23: mol_type = other RNA; note = Description of Artificial Sequence: Synthetic oligonucleotide
  modified_base 1: mod_base = OTHER; note = 2'-O-methyladenosine-3'-phosphate
  modified_base 2: mod_base = OTHER; note = 2'-fluoroadenosine-3'-phosphate
  modified_base 3: mod_base = OTHER; note = 2'-O-methyladenosine-3'-phosphate
  modified_base 4: mod_base = OTHER; note = 2'-fluoroadenosine-3'-phosphate
  modified_base 5: mod_base = OTHER; note = 2'-O-methyladenosine-3'-phosphate
  modified_base 6: mod_base = OTHER; note = 2'-fluoroguanosine-3'-phosphate
  modified_base 7: mod_base = OTHER; note = 2'-O-methyladenosine-3'-phosphate
  modified_base 8: mod_base = OTHER; note = 2'-fluorouridine-3'-phosphate
  modified_base 9: mod_base = OTHER; note = 2'-O-methyladenosine-3'-phosphate
  modified_base 10: mod_base = OTHER; note = 2'-fluoroadenosine-3'-phosphate
  modified_base 11: mod_base = OTHER; note = 2'-O-methyladenosine-3'-phosphate
  modified_base 12: mod_base = OTHER; note = 2'-O-methyluridine-3'-phosphate
  modified_base 13: mod_base = OTHER; note = 2'-O-methylguanosine-3'-phosphate
  modified_base 14: mod_base = OTHER; note = 2'-fluorouridine-3'-phosphate
  modified_base 15: mod_base = OTHER; note = 2'-O-methylcytidine-3'-phosphate
  modified_base 16: mod_base = OTHER; note = 2'-fluorouridine-3'-phosphate
  modified_base 17: mod_base = OTHER; note = 2'-O-methylguanosine-3'-phosphate
  modified_base 18: mod_base = OTHER; note = 2'-fluorocytidine-3'-phosphate
  modified_base 19: mod_base = OTHER; note = 2'-O-methyluridine-3'-phosphate
  modified_base 20: mod_base = OTHER; note = 2'-fluorouridine-3'-phosphate
  modified_base 21: mod_base = OTHER; note = 2'-O-methylguanosine-3'-phosphorothioate
  modified_base 22: mod_base = OTHER; note = 2'-fluorocytidine-3'-phosphorothioate
  modified_base 23: mod_base = OTHER; note = 2'-O-methyluridine-3'-phosphate
aaaaagataaatgtctgcttgct

SEQ ID NO: 153 - RNA, 21 nt, synthetic construct
  source 1..21: mol_type = other RNA; note = Description of Artificial Sequence: Synthetic oligonucleotide
  modified_base 1: mod_base = OTHER; note = 2'-fluorocytidine-3'-phosphate
  modified_base 2: mod_base = OTHER; note = 2'-O-methyladenosine-3'-phosphate
  modified_base 3: mod_base = OTHER; note = 2'-fluoroadenosine-3'-phosphate
  modified_base 4: mod_base = OTHER; note = 2'-O-methylguanosine-3'-phosphate
  modified_base 5: mod_base = OTHER; note = 2'-O-methylcytidine-3'-phosphate
  modified_base 6: mod_base = OTHER; note = 2'-O-methyladenosine-3'-phosphate
  modified_base 7: mod_base = OTHER; note = 2'-fluoroguanosine-3'-phosphate
  modified_base 8: mod_base = OTHER; note = 2'-O-methyladenosine-3'-phosphate
  modified_base 9: mod_base = OTHER; note = 2'-fluorocytidine-3'-phosphate
  modified_base 10: mod_base = OTHER; note = 2'-fluoroadenosine-3'-phosphate
  modified_base 11: mod_base = OTHER; note = 2'-fluorouridine-3'-phosphate
  modified_base 12: mod_base = OTHER; note = 2'-O-methyluridine-3'-phosphate
  modified_base 13: mod_base = OTHER; note = 2'-fluorouridine-3'-phosphate
  modified_base 14: mod_base = OTHER; note = 2'-O-methyladenosine-3'-phosphate
  modified_base 15: mod_base = OTHER; note = 2'-fluorouridine-3'-phosphate
  modified_base 16: mod_base = OTHER; note = 2'-O-methylcytidine-3'-phosphate
  modified_base 17: mod_base = OTHER; note = 2'-fluorouridine-3'-phosphate
  modified_base 18: mod_base = OTHER; note = 2'-fluorouridine-3'-phosphate
  modified_base 19: mod_base = OTHER; note = 2'-fluorouridine-3'-phosphate
  modified_base 20: mod_base = OTHER; note = 2'-O-methyluridine-3'-phosphate
  modified_base 21: mod_base = OTHER; note = 2'-fluorouridine-3'-phosphate N-[tris(GalNAc-alkyl)-amidodecanoyl)]-4-hydroxyprolinol Hyp-(GalNAc-alkyl)3
caagcagacatttatcttttt

SEQ ID NO: 154 - RNA, 23 nt, synthetic construct
  source 1..23: mol_type = other RNA; note = Description of Artificial Sequence: Synthetic oligonucleotide
  modified_base 1: mod_base = OTHER; note = 2'-O-methyladenosine-3'-phosphate
  modified_base 2: mod_base = OTHER; note = 2'-fluoroadenosine-3'-phosphate
  modified_base 3: mod_base = OTHER; note = 2'-O-methyladenosine-3'-phosphate
  modified_base 4: mod_base = OTHER; note = 2'-fluoroadenosine-3'-phosphate
  modified_base 5: mod_base = OTHER; note = 2'-O-methyladenosine-3'-phosphate
  modified_base 6: mod_base = OTHER; note = 2'-fluoroguanosine-3'-phosphate
  modified_base 7: mod_base = OTHER; note = 2'-O-methyladenosine-3'-phosphate
  modified_base 8: mod_base = OTHER; note = 2'-fluorouridine-3'-phosphate
  modified_base 9: mod_base = OTHER; note = 2'-O-methyladenosine-3'-phosphate
  modified_base 10: mod_base = OTHER; note = 2'-fluoroadenosine-3'-phosphate
  modified_base 11: mod_base = OTHER; note = 2'-O-methyladenosine-3'-phosphate
  modified_base 12: mod_base = OTHER; note = 2'-O-methyluridine-3'-phosphate
  modified_base 13: mod_base = OTHER; note = 2'-O-methylguanosine-3'-phosphate
  modified_base 14: mod_base = OTHER; note = 2'-fluorouridine-3'-phosphate
  modified_base 15: mod_base = OTHER; note = 2'-O-methylcytidine-3'-phosphate
  modified_base 16: mod_base = OTHER; note = 2'-fluorouridine-3'-phosphate
  modified_base 17: mod_base = OTHER; note = 2'-O-methylguanosine-3'-phosphate
  modified_base 18: mod_base = OTHER; note = 2'-fluorocytidine-3'-phosphate
  modified_base 19: mod_base = OTHER; note = 2'-O-methyluridine-3'-phosphate
  modified_base 20: mod_base = OTHER; note = 2'-fluorouridine-3'-phosphate
  modified_base 21: mod_base = OTHER; note = 2'-O-methylguanosine-3'-phosphorothioate
  modified_base 22: mod_base = OTHER; note = 2'-fluorocytidine-3'-phosphorothioate
  modified_base 23: mod_base = OTHER; note = 2'-O-methyluridine-3'-phosphate
aaaaagataaatgtctgcttgct

SEQ ID NO: 155 - RNA, 21 nt, synthetic construct
  source 1..21: mol_type = other RNA; note = Description of Artificial Sequence: Synthetic oligonucleotide
  modified_base 1: mod_base = OTHER; note = 2'-fluorocytidine-3'-phosphate
  modified_base 2: mod_base = OTHER; note = 2'-O-methyladenosine-3'-phosphate
  modified_base 3: mod_base = OTHER; note = 2'-O-methyladenosine-3'-phosphate
  modified_base 4: mod_base = OTHER; note = 2'-O-methylguanosine-3'-phosphate
  modified_base 5: mod_base = OTHER; note = 2'-fluorocytidine-3'-phosphate
  modified_base 6: mod_base = OTHER; note = 2'-O-methyladenosine-3'-phosphate
  modified_base 7: mod_base = OTHER; note = 2'-fluoroguanosine-3'-phosphate
  modified_base 8: mod_base = OTHER; note = 2'-O-methyladenosine-3'-phosphate
  modified_base 9: mod_base = OTHER; note = 2'-fluorocytidine-3'-phosphate
  modified_base 10: mod_base = OTHER; note = 2'-fluoroadenosine-3'-phosphate
  modified_base 11: mod_base = OTHER; note = 2'-fluorouridine-3'-phosphate
  modified_base 12: mod_base = OTHER; note = 2'-O-methyluridine-3'-phosphate
  modified_base 13: mod_base = OTHER; note = 2'-fluorouridine-3'-phosphate
  modified_base 14: mod_base = OTHER; note = 2'-O-methyladenosine-3'-phosphate
  modified_base 15: mod_base = OTHER; note = 2'-fluorouridine-3'-phosphate
  modified_base 16: mod_base = OTHER; note = 2'-O-methylcytidine-3'-phosphate
  modified_base 17: mod_base = OTHER; note = 2'-fluorouridine-3'-phosphate
  modified_base 18: mod_base = OTHER; note = 2'-fluorouridine-3'-phosphate
  modified_base 19: mod_base = OTHER; note = 2'-fluorouridine-3'-phosphate
  modified_base 20: mod_base = OTHER; note = 2'-O-methyluridine-3'-phosphate
  modified_base 21: mod_base = OTHER; note = 2'-fluorouridine-3'-phosphate N-[tris(GalNAc-alkyl)-amidodecanoyl)]-4-hydroxyprolinol Hyp-(GalNAc-alkyl)3
caagcagacatttatcttttt

SEQ ID NO: 156 - RNA, 23 nt, synthetic construct
  source 1..23: mol_type = other RNA; note = Description of Artificial Sequence: Synthetic oligonucleotide
  modified_base 1: mod_base = OTHER; note = 2'-O-methyladenosine-3'-phosphate
  modified_base 2: mod_base = OTHER; note = 2'-fluoroadenosine-3'-phosphate
  modified_base 3: mod_base = OTHER; note = 2'-O-methyladenosine-3'-phosphate
  modified_base 4: mod_base = OTHER; note = 2'-fluoroadenosine-3'-phosphate
  modified_base 5: mod_base = OTHER; note = 2'-O-methyladenosine-3'-phosphate
  modified_base 6: mod_base = OTHER; note = 2'-fluoroguanosine-3'-phosphate
  modified_base 7: mod_base = OTHER; note = 2'-O-methyladenosine-3'-phosphate
  modified_base 8: mod_base = OTHER; note = 2'-fluorouridine-3'-phosphate
  modified_base 9: mod_base = OTHER; note = 2'-O-methyladenosine-3'-phosphate
  modified_base 10: mod_base = OTHER; note = 2'-fluoroadenosine-3'-phosphate
  modified_base 11: mod_base = OTHER; note = 2'-O-methyladenosine-3'-phosphate
  modified_base 12: mod_base = OTHER; note = 2'-O-methyluridine-3'-phosphate
  modified_base 13: mod_base = OTHER; note = 2'-O-methylguanosine-3'-phosphate
  modified_base 14: mod_base = OTHER; note = 2'-fluorouridine-3'-phosphate
  modified_base 15: mod_base = OTHER; note = 2'-O-methylcytidine-3'-phosphate
  modified_base 16: mod_base = OTHER; note = 2'-fluorouridine-3'-phosphate
  modified_base 17: mod_base = OTHER; note = 2'-O-methylguanosine-3'-phosphate
  modified_base 18: mod_base = OTHER; note = 2'-fluorocytidine-3'-phosphate
  modified_base 19: mod_base = OTHER; note = 2'-O-methyluridine-3'-phosphate
  modified_base 20: mod_base = OTHER; note = 2'-fluorouridine-3'-phosphate
  modified_base 21: mod_base = OTHER; note = 2'-O-methylguanosine-3'-phosphorothioate
  modified_base 22: mod_base = OTHER; note = 2'-fluorocytidine-3'-phosphorothioate
  modified_base 23: mod_base = OTHER; note = 2'-O-methyluridine-3'-phosphate
aaaaagataaatgtctgcttgct

SEQ ID NO: 157 - RNA, 21 nt, synthetic construct
  source 1..21: mol_type = other RNA; note = Description of Artificial Sequence: Synthetic oligonucleotide
  modified_base 1: mod_base = OTHER; note = 2'-O-methylcytidine-3'-phosphate
  modified_base 2: mod_base = OTHER; note = 2'-O-methyladenosine-3'-phosphate
  modified_base 3: mod_base = OTHER; note = 2'-fluoroadenosine-3'-phosphate
  modified_base 4: mod_base = OTHER; note = 2'-O-methylguanosine-3'-phosphate
  modified_base 5: mod_base = OTHER; note = 2'-fluorocytidine-3'-phosphate
  modified_base 6: mod_base = OTHER; note = 2'-O-methyladenosine-3'-phosphate
  modified_base 7: mod_base = OTHER; note = 2'-fluoroguanosine-3'-phosphate
  modified_base 8: mod_base = OTHER; note = 2'-O-methyladenosine-3'-phosphate
  modified_base 9: mod_base = OTHER; note = 2'-fluorocytidine-3'-phosphate
  modified_base 10: mod_base = OTHER; note = 2'-fluoroadenosine-3'-phosphate
  modified_base 11: mod_base = OTHER; note = 2'-fluorouridine-3'-phosphate
  modified_base 12: mod_base = OTHER; note = 2'-O-methyluridine-3'-phosphate
  modified_base 13: mod_base = OTHER; note = 2'-fluorouridine-3'-phosphate
  modified_base 14: mod_base = OTHER; note = 2'-O-methyladenosine-3'-phosphate
  modified_base 15: mod_base = OTHER; note = 2'-fluorouridine-3'-phosphate
  modified_base 16: mod_base = OTHER; note = 2'-O-methylcytidine-3'-phosphate
  modified_base 17: mod_base = OTHER; note = 2'-fluorouridine-3'-phosphate
  modified_base 18: mod_base = OTHER; note = 2'-fluorouridine-3'-phosphate
  modified_base 19: mod_base = OTHER; note = 2'-fluorouridine-3'-phosphate
  modified_base 20: mod_base = OTHER; note = 2'-O-methyluridine-3'-phosphate
  modified_base 21: mod_base = OTHER; note = 2'-fluorouridine-3'-phosphate N-[tris(GalNAc-alkyl)-amidodecanoyl)]-4-hydroxyprolinol Hyp-(GalNAc-alkyl)3
caagcagacatttatcttttt

SEQ ID NO: 158 - RNA, 23 nt, synthetic construct
  source 1..23: mol_type = other RNA; note = Description of Artificial Sequence: Synthetic oligonucleotide
  modified_base 1: mod_base = OTHER; note = 2'-O-methyladenosine-3'-phosphate
  modified_base 2: mod_base = OTHER; note = 2'-fluoroadenosine-3'-phosphate
  modified_base 3: mod_base = OTHER; note = 2'-O-methyladenosine-3'-phosphate
  modified_base 4: mod_base = OTHER; note = 2'-fluoroadenosine-3'-phosphate
  modified_base 5: mod_base = OTHER; note = 2'-O-methyladenosine-3'-phosphate
  modified_base 6: mod_base = OTHER; note = 2'-fluoroguanosine-3'-phosphate
  modified_base 7: mod_base = OTHER; note = 2'-O-methyladenosine-3'-phosphate
  modified_base 8: mod_base = OTHER; note = 2'-fluorouridine-3'-phosphate
  modified_base 9: mod_base = OTHER; note = 2'-O-methyladenosine-3'-phosphate
  modified_base 10: mod_base = OTHER; note = 2'-fluoroadenosine-3'-phosphate
  modified_base 11: mod_base = OTHER; note = 2'-O-methyladenosine-3'-phosphate
  modified_base 12: mod_base = OTHER; note = 2'-O-methyluridine-3'-phosphate
  modified_base 13: mod_base = OTHER; note = 2'-O-methylguanosine-3'-phosphate
  modified_base 14: mod_base = OTHER; note = 2'-fluorouridine-3'-phosphate
  modified_base 15: mod_base = OTHER; note = 2'-O-methylcytidine-3'-phosphate
  modified_base 16: mod_base = OTHER; note = 2'-fluorouridine-3'-phosphate
  modified_base 17: mod_base = OTHER; note = 2'-O-methylguanosine-3'-phosphate
  modified_base 18: mod_base = OTHER; note = 2'-fluorocytidine-3'-phosphate
  modified_base 19: mod_base = OTHER; note = 2'-O-methyluridine-3'-phosphate
  modified_base 20: mod_base = OTHER; note = 2'-fluorouridine-3'-phosphate
  modified_base 21: mod_base = OTHER; note = 2'-O-methylguanosine-3'-phosphorothioate
  modified_base 22: mod_base = OTHER; note = 2'-fluorocytidine-3'-phosphorothioate
  modified_base 23: mod_base = OTHER; note = 2'-O-methyluridine-3'-phosphate
aaaaagataaatgtctgcttgct

SEQ ID NO: 159 - RNA, 21 nt, synthetic construct
  source 1..21: mol_type = other RNA; note = Description of Artificial Sequence: Synthetic oligonucleotide
  modified_base 1: mod_base = OTHER; note = 2'-fluorocytidine-3'-phosphate
  modified_base 2: mod_base = OTHER; note = 2'-O-methyladenosine-3'-phosphate
  modified_base 3: mod_base = OTHER; note = 2'-fluoroadenosine-3'-phosphate
  modified_base 4: mod_base = OTHER; note = 2'-O-methylguanosine-3'-phosphate
  modified_base 5: mod_base = OTHER; note = 2'-fluorocytidine-3'-phosphate
  modified_base 6: mod_base = OTHER; note = 2'-O-methyladenosine-3'-phosphate
  modified_base 7: mod_base = OTHER; note = 2'-fluoroguanosine-3'-phosphate
  modified_base 8: mod_base = OTHER; note = 2'-O-methyladenosine-3'-phosphate
  modified_base 9: mod_base = OTHER; note = 2'-fluorocytidine-3'-phosphate
  modified_base 10: mod_base = OTHER; note = 2'-fluoroadenosine-3'-phosphate
  modified_base 11: mod_base = OTHER; note = 2'-fluorouridine-3'-phosphate
  modified_base 12: mod_base = OTHER; note = 2'-O-methyluridine-3'-phosphate
  modified_base 13: mod_base = OTHER; note = 2'-fluorouridine-3'-phosphate
  modified_base 14: mod_base = OTHER; note = 2'-fluoroadenosine-3'-phosphate
  modified_base 15: mod_base = OTHER; note = 2'-fluorouridine-3'-phosphate
  modified_base 16: mod_base = OTHER; note = 2'-O-methylcytidine-3'-phosphate
  modified_base 17: mod_base = OTHER; note = 2'-fluorouridine-3'-phosphate
  modified_base 18: mod_base = OTHER; note = 2'-fluorouridine-3'-phosphate
  modified_base 19: mod_base = OTHER; note = 2'-fluorouridine-3'-phosphate
  modified_base 20: mod_base = OTHER; note = 2'-O-methyluridine-3'-phosphate
  modified_base 21: mod_base = OTHER; note = 2'-fluorouridine-3'-phosphate N-[tris(GalNAc-alkyl)-amidodecanoyl)]-4-hydroxyprolinol Hyp-(GalNAc-alkyl)3
caagcagacatttatcttttt

SEQ ID NO: 160 - RNA, 23 nt, synthetic construct
  source 1..23: mol_type = other RNA; note = Description of Artificial Sequence: Synthetic oligonucleotide
  modified_base 1: mod_base = OTHER; note = 2'-O-methyladenosine-3'-phosphate
  modified_base 2: mod_base = OTHER; note = 2'-fluoroadenosine-3'-phosphate
  modified_base 3: mod_base = OTHER; note = 2'-O-methyladenosine-3'-phosphate
  modified_base 4: mod_base = OTHER; note = 2'-fluoroadenosine-3'-phosphate
  modified_base 5: mod_base = OTHER; note = 2'-O-methyladenosine-3'-phosphate
  modified_base 6: mod_base = OTHER; note = 2'-fluoroguanosine-3'-phosphate
  modified_base 7: mod_base = OTHER; note = 2'-O-methyladenosine-3'-phosphate
  modified_base 8: mod_base = OTHER; note = 2'-fluorouridine-3'-phosphate
  modified_base 9: mod_base = OTHER; note = 2'-O-methyladenosine-3'-phosphate
  modified_base 10: mod_base = OTHER; note = 2'-fluoroadenosine-3'-phosphate
  modified_base 11: mod_base = OTHER; note = 2'-O-methyladenosine-3'-phosphate
  modified_base 12: mod_base = OTHER; note = 2'-O-methyluridine-3'-phosphate
  modified_base 13: mod_base = OTHER; note = 2'-O-methylguanosine-3'-phosphate
  modified_base 14: mod_base = OTHER; note = 2'-fluorouridine-3'-phosphate
  modified_base 15: mod_base = OTHER; note = 2'-O-methylcytidine-3'-phosphate
  modified_base 16: mod_base = OTHER; note = 2'-fluorouridine-3'-phosphate
  modified_base 17: mod_base = OTHER; note = 2'-O-methylguanosine-3'-phosphate
  modified_base 18: mod_base = OTHER; note = 2'-fluorocytidine-3'-phosphate
  modified_base 19: mod_base = OTHER; note = 2'-O-methyluridine-3'-phosphate
  modified_base 20: mod_base = OTHER; note = 2'-fluorouridine-3'-phosphate
  modified_base 21: mod_base = OTHER; note = 2'-O-methylguanosine-3'-phosphorothioate
  modified_base 22: mod_base = OTHER; note = 2'-fluorocytidine-3'-phosphorothioate
  modified_base 23: mod_base = OTHER; note = 2'-O-methyluridine-3'-phosphate
aaaaagataaatgtctgcttgct

SEQ ID NO: 161 - RNA, 21 nt, synthetic construct
  source 1..21: mol_type = other RNA; note = Description of Artificial Sequence: Synthetic oligonucleotide
  modified_base 1: mod_base = OTHER; note = 2'-fluorocytidine-3'-phosphate
  modified_base 2: mod_base = OTHER; note = 2'-O-methyladenosine-3'-phosphate
  modified_base 3: mod_base = OTHER; note = 2'-fluoroadenosine-3'-phosphate
  modified_base 4: mod_base = OTHER; note = 2'-O-methylguanosine-3'-phosphate
  modified_base 5: mod_base = OTHER; note = 2'-fluorocytidine-3'-phosphate
  modified_base 6: mod_base = OTHER; note = 2'-O-methyladenosine-3'-phosphate
  modified_base 7: mod_base = OTHER; note = 2'-fluoroguanosine-3'-phosphate
  modified_base 8: mod_base = OTHER; note = 2'-O-methyladenosine-3'-phosphate
  modified_base 9: mod_base = OTHER; note = 2'-fluorocytidine-3'-phosphate
  modified_base 10: mod_base = OTHER; note = 2'-fluoroadenosine-3'-phosphate
  modified_base 11: mod_base = OTHER; note = 2'-fluorouridine-3'-phosphate
  modified_base 12: mod_base = OTHER; note = 2'-O-methyluridine-3'-phosphate
  modified_base 13: mod_base = OTHER; note = 2'-fluorouridine-3'-phosphate
  modified_base 14: mod_base = OTHER; note = 2'-fluoroadenosine-3'-phosphate
  modified_base 15: mod_base = OTHER; note = 2'-fluorouridine-3'-phosphate
  modified_base 16: mod_base = OTHER; note = 2'-O-methylcytidine-3'-phosphate
  modified_base 17: mod_base = OTHER; note = 2'-fluorouridine-3'-phosphate
  modified_base 18: mod_base = OTHER; note = 2'-fluorouridine-3'-phosphate
  modified_base 19: mod_base = OTHER; note = 2'-fluorouridine-3'-phosphate
  modified_base 20: mod_base = OTHER; note = 2'-O-methyluridine-3'-phosphate
  modified_base 21: mod_base = OTHER; note = 2'-fluorouridine-3'-phosphate N-[tris(GalNAc-alkyl)-amidodecanoyl)]-4-hydroxyprolinol Hyp-(GalNAc-alkyl)3
caagcagacatttatcttttt

SEQ ID NO: 162 - RNA, 23 nt, synthetic construct
  source 1..23: mol_type = other RNA; note = Description of Artificial Sequence: Synthetic oligonucleotide
  modified_base 1: mod_base = OTHER; note = 2'-O-methyladenosine-3'-phosphate
  modified_base 2: mod_base = OTHER; note = 2'-fluoroadenosine-3'-phosphate
  modified_base 3: mod_base = OTHER; note = 2'-O-methyladenosine-3'-phosphate
  modified_base 4: mod_base = OTHER; note = 2'-fluoroadenosine-3'-phosphate
  modified_base 5: mod_base = OTHER; note = 2'-O-methyladenosine-3'-phosphate
  modified_base 6: mod_base = OTHER; note = 2'-fluoroguanosine-3'-phosphate
  modified_base 7: mod_base = OTHER; note = 2'-O-methyladenosine-3'-phosphate
  modified_base 8: mod_base = OTHER; note = 2'-fluorouridine-3'-phosphate
  modified_base 9: mod_base = OTHER; note = 2'-O-methyladenosine-3'-phosphate
  modified_base 10: mod_base = OTHER; note = 2'-fluoroadenosine-3'-phosphate
  modified_base 11: mod_base = OTHER; note = 2'-O-methyladenosine-3'-phosphate
  modified_base 12: mod_base = OTHER; note = 2'-O-methyluridine-3'-phosphate
  modified_base 13: mod_base = OTHER; note = 2'-O-methylguanosine-3'-phosphate
  modified_base 14: mod_base = OTHER; note = 2'-fluorouridine-3'-phosphate
  modified_base 15: mod_base = OTHER; note = 2'-O-methylcytidine-3'-phosphate
  modified_base 16: mod_base = OTHER; note = 2'-fluorouridine-3'-phosphate
  modified_base 17: mod_base = OTHER; note = 2'-O-methylguanosine-3'-phosphate
  modified_base 18: mod_base = OTHER; note = 2'-fluorocytidine-3'-phosphate
  modified_base 19: mod_base = OTHER; note = 2'-O-methyluridine-3'-phosphate
  modified_base 20: mod_base = OTHER; note = 2'-fluorouridine-3'-phosphate
  modified_base 21: mod_base = OTHER; note = 2'-O-methylguanosine-3'-phosphorothioate
  modified_base 22: mod_base = OTHER; note = 2'-fluorocytidine-3'-phosphorothioate
  modified_base 23: mod_base = OTHER; note = 2'-O-methyluridine-3'-phosphate
aaaaagataaatgtctgcttgct

SEQ ID NO: 163 - RNA, 21 nt, synthetic construct
  source 1..21: mol_type = other RNA; note = Description of Artificial Sequence: Synthetic oligonucleotide
  modified_base 1: mod_base = OTHER; note = 2'-fluorocytidine-3'-phosphate
  modified_base 2: mod_base = OTHER; note = 2'-O-methyladenosine-3'-phosphate
  modified_base 3: mod_base = OTHER; note = 2'-fluoroadenosine-3'-phosphate
  modified_base 4: mod_base = OTHER; note = 2'-O-methylguanosine-3'-phosphate
  modified_base 5: mod_base = OTHER; note = 2'-fluorocytidine-3'-phosphate
  modified_base 6: mod_base = OTHER; note = 2'-fluoroadenosine-3'-phosphate
  modified_base 7: mod_base = OTHER; note = 2'-fluoroguanosine-3'-phosphate
  modified_base 8: mod_base = OTHER; note = 2'-O-methyladenosine-3'-phosphate
  modified_base 9: mod_base = OTHER; note = 2'-fluorocytidine-3'-phosphate
  modified_base 10: mod_base = OTHER; note = 2'-fluoroadenosine-3'-phosphate
  modified_base 11: mod_base = OTHER; note = 2'-fluorouridine-3'-phosphate
  modified_base 12: mod_base = OTHER; note = 2'-O-methyluridine-3'-phosphate
  modified_base 13: mod_base = OTHER; note = 2'-fluorouridine-3'-phosphate
  modified_base 14: mod_base = OTHER; note = 2'-O-methyladenosine-3'-phosphate
  modified_base 15: mod_base = OTHER; note = 2'-fluorouridine-3'-phosphate
  modified_base 16: mod_base = OTHER; note = 2'-O-methylcytidine-3'-phosphate
  modified_base 17: mod_base = OTHER; note = 2'-fluorouridine-3'-phosphate
  modified_base 18: mod_base = OTHER; note = 2'-fluorouridine-3'-phosphate
  modified_base 19: mod_base = OTHER; note = 2'-fluorouridine-3'-phosphate
  modified_base 20: mod_base = OTHER; note = 2'-O-methyluridine-3'-phosphate
  modified_base 21: mod_base = OTHER; note = 2'-fluorouridine-3'-phosphate N-[tris(GalNAc-alkyl)-amidodecanoyl)]-4-hydroxyprolinol Hyp-(GalNAc-alkyl)3
caagcagacatttatcttttt

SEQ ID NO: 164 - RNA, 23 nt, synthetic construct
  source 1..23: mol_type = other RNA; note = Description of Artificial Sequence: Synthetic oligonucleotide
  modified_base 1: mod_base = OTHER; note = 2'-O-methyladenosine-3'-phosphate
  modified_base 2: mod_base = OTHER; note = 2'-fluoroadenosine-3'-phosphate
  modified_base 3: mod_base = OTHER; note = 2'-O-methyladenosine-3'-phosphate
  modified_base 4: mod_base = OTHER; note = 2'-fluoroadenosine-3'-phosphate
  modified_base 5: mod_base = OTHER; note = 2'-O-methyladenosine-3'-phosphate
  modified_base 6: mod_base = OTHER; note = 2'-fluoroguanosine-3'-phosphate
  modified_base 7: mod_base = OTHER; note = 2'-O-methyladenosine-3'-phosphate
  modified_base 8: mod_base = OTHER; note = 2'-fluorouridine-3'-phosphate
  modified_base 9: mod_base = OTHER; note = 2'-O-methyladenosine-3'-phosphate
  modified_base 10: mod_base = OTHER; note = 2'-fluoroadenosine-3'-phosphate
  modified_base 11: mod_base = OTHER; note = 2'-O-methyladenosine-3'-phosphate
  modified_base 12: mod_base = OTHER; note = 2'-O-methyluridine-3'-phosphate
  modified_base 13: mod_base = OTHER; note = 2'-O-methylguanosine-3'-phosphate
  modified_base 14: mod_base = OTHER; note = 2'-fluorouridine-3'-phosphate
  modified_base 15: mod_base = OTHER; note = 2'-O-methylcytidine-3'-phosphate
  modified_base 16: mod_base = OTHER; note = 2'-fluorouridine-3'-phosphate
  modified_base 17: mod_base = OTHER; note = 2'-O-methylguanosine-3'-phosphate
  modified_base 18: mod_base = OTHER; note = 2'-fluorocytidine-3'-phosphate
  modified_base 19: mod_base = OTHER; note = 2'-O-methyluridine-3'-phosphate
  modified_base 20: mod_base = OTHER; note = 2'-fluorouridine-3'-phosphate
  modified_base 21: mod_base = OTHER; note = 2'-O-methylguanosine-3'-phosphorothioate
  modified_base 22: mod_base = OTHER; note = 2'-fluorocytidine-3'-phosphorothioate
  modified_base 23: mod_base = OTHER; note = 2'-O-methyluridine-3'-phosphate
aaaaagataaatgtctgcttgct

SEQ ID NO: 165 - RNA, 21 nt, synthetic construct
  source 1..21: mol_type = other RNA; note = Description of Artificial Sequence: Synthetic oligonucleotide
  modified_base 1: mod_base = OTHER; note = 2'-fluorocytidine-3'-phosphate
  modified_base 2: mod_base = OTHER; note = 2'-O-methyladenosine-3'-phosphate
  modified_base 3: mod_base = OTHER; note = 2'-fluoroadenosine-3'-phosphate
  modified_base 4: mod_base = OTHER; note = 2'-fluoroguanosine-3'-phosphate
  modified_base 5: mod_base = OTHER; note = 2'-fluorocytidine-3'-phosphate
  modified_base 6: mod_base = OTHER; note = 2'-O-methyladenosine-3'-phosphate
  modified_base 7: mod_base = OTHER; note = 2'-fluoroguanosine-3'-phosphate
  modified_base 8: mod_base = OTHER; note = 2'-O-methyladenosine-3'-phosphate
  modified_base 9: mod_base = OTHER; note = 2'-fluorocytidine-3'-phosphate
  modified_base 10: mod_base = OTHER; note = 2'-fluoroadenosine-3'-phosphate
  modified_base 11: mod_base = OTHER; note = 2'-fluorouridine-3'-phosphate
  modified_base 12: mod_base = OTHER; note = 2'-O-methyluridine-3'-phosphate
  modified_base 13: mod_base = OTHER; note = 2'-fluorouridine-3'-phosphate
  modified_base 14: mod_base = OTHER; note = 2'-O-methyladenosine-3'-phosphate
  modified_base 15: mod_base = OTHER; note = 2'-fluorouridine-3'-phosphate
  modified_base 16: mod_base = OTHER; note = 2'-O-methylcytidine-3'-phosphate
  modified_base 17: mod_base = OTHER; note = 2'-fluorouridine-3'-phosphate
  modified_base 18: mod_base = OTHER; note = 2'-fluorouridine-3'-phosphate
  modified_base 19: mod_base = OTHER; note = 2'-fluorouridine-3'-phosphate
  modified_base 20: mod_base = OTHER; note = 2'-O-methyluridine-3'-phosphate
  modified_base 21: mod_base = OTHER; note = 2'-fluorouridine-3'-phosphate N-[tris(GalNAc-alkyl)-amidodecanoyl)]-4-hydroxyprolinol Hyp-(GalNAc-alkyl)3
caagcagacatttatcttttt

SEQ ID NO: 166 - RNA, 23 nt, synthetic construct
  source 1..23: mol_type = other RNA; note = Description of Artificial Sequence: Synthetic oligonucleotide
  modified_base 1: mod_base = OTHER; note = 2'-O-methyladenosine-3'-phosphate
  modified_base 2: mod_base = OTHER; note = 2'-fluoroadenosine-3'-phosphate
  modified_base 3: mod_base = OTHER; note = 2'-O-methyladenosine-3'-phosphate
  modified_base 4: mod_base = OTHER; note = 2'-fluoroadenosine-3'-phosphate
  modified_base 5: mod_base = OTHER; note = 2'-O-methyladenosine-3'-phosphate
  modified_base 6: mod_base = OTHER; note = 2'-fluoroguanosine-3'-phosphate
  modified_base 7: mod_base = OTHER; note = 2'-O-methyladenosine-3'-phosphate
  modified_base 8: mod_base = OTHER; note = 2'-fluorouridine-3'-phosphate
  modified_base 9: mod_base = OTHER; note = 2'-O-methyladenosine-3'-phosphate
  modified_base 10: mod_base = OTHER; note = 2'-fluoroadenosine-3'-phosphate
  modified_base 11: mod_base = OTHER; note = 2'-O-methyladenosine-3'-phosphate
  modified_base 12: mod_base = OTHER; note = 2'-O-methyluridine-3'-phosphate
  modified_base 13: mod_base = OTHER; note = 2'-O-methylguanosine-3'-phosphate
  modified_base 14: mod_base = OTHER; note = 2'-fluorouridine-3'-phosphate
  modified_base 15: mod_base = OTHER; note = 2'-O-methylcytidine-3'-phosphate
  modified_base 16: mod_base = OTHER; note = 2'-fluorouridine-3'-phosphate
  modified_base 17: mod_base = OTHER; note = 2'-O-methylguanosine-3'-phosphate
  modified_base 18: mod_base = OTHER; note = 2'-fluorocytidine-3'-phosphate
  modified_base 19: mod_base = OTHER; note = 2'-O-methyluridine-3'-phosphate
  modified_base 20: mod_base = OTHER; note = 2'-fluorouridine-3'-phosphate
  modified_base 21: mod_base = OTHER; note = 2'-O-methylguanosine-3'-phosphorothioate
  modified_base 22: mod_base = OTHER; note = 2'-fluorocytidine-3'-phosphorothioate
  modified_base 23: mod_base = OTHER; note = 2'-O-methyluridine-3'-phosphate
aaaaagataaatgtctgcttgct

SEQ ID NO: 167 - RNA, 21 nt, synthetic construct
  source 1..21: mol_type = other RNA; note = Description of Artificial Sequence: Synthetic oligonucleotide
  modified_base 1: mod_base = OTHER; note = 2'-fluorocytidine-3'-phosphate
  modified_base 2: mod_base = OTHER; note = 2'-O-methyladenosine-3'-phosphate
  modified_base 3: mod_base = OTHER; note = 2'-fluoroadenosine-3'-phosphate
  modified_base 4: mod_base = OTHER; note = 2'-O-methylguanosine-3'-phosphate
  modified_base 5: mod_base = OTHER; note = 2'-fluorocytidine-3'-phosphate
  modified_base 6: mod_base = OTHER; note = 2'-O-methyladenosine-3'-phosphate
  modified_base 7: mod_base = OTHER; note = 2'-fluoroguanosine-3'-phosphate
  modified_base 8: mod_base = OTHER; note = 2'-O-methyladenosine-3'-phosphate
  modified_base 9: mod_base = OTHER; note = 2'-fluorocytidine-3'-phosphate
  modified_base 10: mod_base = OTHER; note = 2'-fluoroadenosine-3'-phosphate
  modified_base 11: mod_base = OTHER; note = 2'-fluorouridine-3'-phosphate
  modified_base 12: mod_base = OTHER; note = 2'-O-methyluridine-3'-phosphate
  modified_base 13: mod_base = OTHER; note = 2'-fluorouridine-3'-phosphate
  modified_base 14: mod_base = OTHER; note = 2'-O-methyladenosine-3'-phosphate
  modified_base 15: mod_base = OTHER; note = 2'-fluorouridine-3'-phosphate
  modified_base 16: mod_base = OTHER; note = 2'-fluorocytidine-3'-phosphate
  modified_base 17: mod_base = OTHER; note = 2'-fluorouridine-3'-phosphate
  modified_base 18: mod_base = OTHER; note = 2'-O-methyluridine-3'-phosphate
  modified_base 19: mod_base = OTHER; note = 2'-O-methyluridine-3'-phosphate
  modified_base 20: mod_base = OTHER; note = 2'-O-methyluridine-3'-phosphate
  modified_base 21: mod_base = OTHER; note = 2'-fluorouridine-3'-phosphate N-[tris(GalNAc-alkyl)-amidodecanoyl)]-4-hydroxyprolinol Hyp-(GalNAc-alkyl)3
caagcagacatttatcttttt

SEQ ID NO: 168 - RNA, 23 nt, synthetic construct
  source 1..23: mol_type = other RNA; note = Description of Artificial Sequence: Synthetic oligonucleotide
  modified_base 1: mod_base = OTHER; note = 2'-O-methyladenosine-3'-phosphate
  modified_base 2: mod_base = OTHER; note = 2'-fluoroadenosine-3'-phosphate
  modified_base 3: mod_base = OTHER; note = 2'-O-methyladenosine-3'-phosphate
  modified_base 4: mod_base = OTHER; note = 2'-fluoroadenosine-3'-phosphate
  modified_base 5: mod_base = OTHER; note = 2'-O-methyladenosine-3'-phosphate
  modified_base 6: mod_base = OTHER; note = 2'-fluoroguanosine-3'-phosphate
  modified_base 7: mod_base = OTHER; note = 2'-O-methyladenosine-3'-phosphate
  modified_base 8: mod_base = OTHER; note = 2'-fluorouridine-3'-phosphate
  modified_base 9: mod_base = OTHER; note = 2'-O-methyladenosine-3'-phosphate
  modified_base 10: mod_base = OTHER; note = 2'-fluoroadenosine-3'-phosphate
  modified_base 11: mod_base = OTHER; note = 2'-O-methyladenosine-3'-phosphate
  modified_base 12: mod_base = OTHER; note = 2'-O-methyluridine-3'-phosphate
  modified_base 13: mod_base = OTHER; note = 2'-O-methylguanosine-3'-phosphate
  modified_base 14: mod_base = OTHER; note = 2'-fluorouridine-3'-phosphate
  modified_base 15: mod_base = OTHER; note = 2'-O-methylcytidine-3'-phosphate
  modified_base 16: mod_base = OTHER; note = 2'-fluorouridine-3'-phosphate
  modified_base 17: mod_base = OTHER; note = 2'-O-methylguanosine-3'-phosphate
  modified_base 18: mod_base = OTHER; note = 2'-fluorocytidine-3'-phosphate
  modified_base 19: mod_base = OTHER; note = 2'-O-methyluridine-3'-phosphate
  modified_base 20: mod_base = OTHER; note = 2'-fluorouridine-3'-phosphate
  modified_base 21: mod_base = OTHER; note = 2'-O-methylguanosine-3'-phosphorothioate
  modified_base 22: mod_base = OTHER; note = 2'-fluorocytidine-3'-phosphorothioate
  modified_base 23: mod_base = OTHER; note = 2'-O-methyluridine-3'-phosphate
aaaaagataaatgtctgcttgct

SEQ ID NO: 169 - RNA, 21 nt, synthetic construct
  source 1..21: mol_type = other RNA; note = Description of Artificial Sequence: Synthetic oligonucleotide
  modified_base 1: mod_base = OTHER; note = 2'-fluorocytidine-3'-phosphate
  modified_base 2: mod_base = OTHER; note = 2'-O-methyladenosine-3'-phosphate
  modified_base 3: mod_base = OTHER; note = 2'-fluoroadenosine-3'-phosphate
  modified_base 4: mod_base = OTHER; note = 2'-O-methylguanosine-3'-phosphate
  modified_base 5: mod_base = OTHER; note = 2'-fluorocytidine-3'-phosphate
  modified_base 6: mod_base = OTHER; note = 2'-O-methyladenosine-3'-phosphate
  modified_base 7: mod_base = OTHER; note = 2'-fluoroguanosine-3'-phosphate
  modified_base 8: mod_base = OTHER; note = 2'-O-methyladenosine-3'-phosphate
  modified_base 9: mod_base = OTHER; note = 2'-fluorocytidine-3'-phosphate
  modified_base 10: mod_base = OTHER; note = 2'-fluoroadenosine-3'-phosphate
  modified_base 11: mod_base = OTHER; note = 2'-fluorouridine-3'-phosphate
  modified_base 12: mod_base = OTHER; note = 2'-O-methyluridine-3'-phosphate
  modified_base 13: mod_base = OTHER; note = 2'-O-methyluridine-3'-phosphate
  modified_base 14: mod_base = OTHER; note = 2'-O-methyladenosine-3'-phosphate
  modified_base 15: mod_base = OTHER; note = 2'-fluorouridine-3'-phosphate
  modified_base 16: mod_base = OTHER; note = 2'-fluorocytidine-3'-phosphate
  modified_base 17: mod_base = OTHER; note = 2'-fluorouridine-3'-phosphate
  modified_base 18: mod_base = OTHER; note = 2'-O-methyluridine-3'-phosphate
  modified_base 19: mod_base = OTHER; note = 2'-fluorouridine-3'-phosphate
  modified_base 20: mod_base = OTHER; note = 2'-O-methyluridine-3'-phosphate
  modified_base 21: mod_base = OTHER; note = 2'-fluorouridine-3'-phosphate N-[tris(GalNAc-alkyl)-amidodecanoyl)]-4-hydroxyprolinol Hyp-(GalNAc-alkyl)3
caagcagacatttatcttttt

SEQ ID NO: 170 - RNA, 23 nt, synthetic construct
  source 1..23: mol_type = other RNA; note = Description of Artificial Sequence: Synthetic oligonucleotide
  modified_base 1: mod_base = OTHER; note = 2'-O-methyladenosine-3'-phosphate
  modified_base 2: mod_base = OTHER; note = 2'-fluoroadenosine-3'-phosphate
  modified_base 3: mod_base = OTHER; note = 2'-O-methyladenosine-3'-phosphate
  modified_base 4: mod_base = OTHER; note = 2'-fluoroadenosine-3'-phosphate
  modified_base 5: mod_base = OTHER; note = 2'-O-methyladenosine-3'-phosphate
  modified_base 6: mod_base = OTHER; note = 2'-fluoroguanosine-3'-phosphate
  modified_base 7: mod_base = OTHER; note = 2'-O-methyladenosine-3'-phosphate
  modified_base 8: mod_base = OTHER; note = 2'-fluorouridine-3'-phosphate
  modified_base 9: mod_base = OTHER; note = 2'-O-methyladenosine-3'-phosphate
  modified_base 10: mod_base = OTHER; note = 2'-fluoroadenosine-3'-phosphate
  modified_base 11: mod_base = OTHER; note = 2'-O-methyladenosine-3'-phosphate
  modified_base 12: mod_base = OTHER; note = 2'-O-methyluridine-3'-phosphate
  modified_base 13: mod_base = OTHER; note = 2'-O-methylguanosine-3'-phosphate
  modified_base 14: mod_base = OTHER; note = 2'-fluorouridine-3'-phosphate
  modified_base 15: mod_base = OTHER; note = 2'-O-methylcytidine-3'-phosphate
  modified_base 16: mod_base = OTHER; note = 2'-fluorouridine-3'-phosphate
  modified_base 17: mod_base = OTHER; note = 2'-O-methylguanosine-3'-phosphate
  modified_base 18: mod_base = OTHER; note = 2'-fluorocytidine-3'-phosphate
  modified_base 19: mod_base = OTHER; note = 2'-O-methyluridine-3'-phosphate
  modified_base 20: mod_base = OTHER; note = 2'-fluorouridine-3'-phosphate
  modified_base 21: mod_base = OTHER; note = 2'-O-methylguanosine-3'-phosphorothioate
  modified_base 22: mod_base = OTHER; note = 2'-fluorocytidine-3'-phosphorothioate
  modified_base 23: mod_base = OTHER; note = 2'-O-methyluridine-3'-phosphate
aaaaagataaatgtctgcttgct

SEQ ID NO: 171 - RNA, 21 nt, synthetic construct
  source 1..21: mol_type = other RNA; note = Description of Artificial Sequence: Synthetic oligonucleotide
  modified_base 1: mod_base = OTHER; note = 2'-fluorocytidine-3'-phosphate
  modified_base 2: mod_base = OTHER; note = 2'-O-methyladenosine-3'-phosphate
  modified_base 3: mod_base = OTHER; note = 2'-fluoroadenosine-3'-phosphate
  modified_base 4: mod_base = OTHER; note = 2'-fluoroguanosine-3'-phosphate
  modified_base 5: mod_base = OTHER; note = 2'-fluorocytidine-3'-phosphate
  modified_base 6: mod_base = OTHER; note = 2'-O-methyladenosine-3'-phosphate
  modified_base 7: mod_base = OTHER; note = 2'-O-methylguanosine-3'-phosphate
  modified_base 8: mod_base = OTHER; note = 2'-O-methyladenosine-3'-phosphate
  modified_base 9: mod_base = OTHER; note = 2'-fluorocytidine-3'-phosphate
  modified_base 10: mod_base = OTHER; note = 2'-fluoroadenosine-3'-phosphate
  modified_base 11: mod_base = OTHER; note = 2'-fluorouridine-3'-phosphate
  modified_base 12: mod_base = OTHER; note = 2'-O-methyluridine-3'-phosphate
  modified_base 13: mod_base = OTHER; note = 2'-fluorouridine-3'-phosphate
  modified_base 14: mod_base = OTHER; note = 2'-O-methyladenosine-3'-phosphate
  modified_base 15: mod_base = OTHER; note = 2'-fluorouridine-3'-phosphate
  modified_base 16: mod_base = OTHER; note = 2'-O-methylcytidine-3'-phosphate
  modified_base 17: mod_base = OTHER; note = 2'-fluorouridine-3'-phosphate
  modified_base 18: mod_base = OTHER; note = 2'-O-methyluridine-3'-phosphate
  modified_base 19: mod_base = OTHER; note = 2'-fluorouridine-3'-phosphate
  modified_base 20: mod_base = OTHER; note = 2'-O-methyluridine-3'-phosphate
  modified_base 21: mod_base = OTHER; note = 2'-fluorouridine-3'-phosphate N-[tris(GalNAc-alkyl)-amidodecanoyl)]-4-hydroxyprolinol Hyp-(GalNAc-alkyl)3
caagcagacatttatcttttt

SEQ ID NO: 172 - RNA, 23 nt, synthetic construct
  source 1..23: mol_type = other RNA; note = Description of Artificial Sequence: Synthetic oligonucleotide
  modified_base 1: mod_base = OTHER; note = 2'-O-methyladenosine-3'-phosphate
  modified_base 2: mod_base = OTHER; note = 2'-fluoroadenosine-3'-phosphate
  modified_base 3: mod_base = OTHER; note = 2'-O-methyladenosine-3'-phosphate
  modified_base 4: mod_base = OTHER; note = 2'-fluoroadenosine-3'-phosphate
  modified_base 5: mod_base = OTHER; note = 2'-O-methyladenosine-3'-phosphate
  modified_base 6: mod_base = OTHER; note = 2'-fluoroguanosine-3'-phosphate
  modified_base 7: mod_base = OTHER; note = 2'-O-methyladenosine-3'-phosphate
  modified_base 8: mod_base = OTHER; note = 2'-fluorouridine-3'-phosphate
  modified_base 9: mod_base = OTHER; note = 2'-O-methyladenosine-3'-phosphate
  modified_base 10: mod_base = OTHER; note = 2'-fluoroadenosine-3'-phosphate
  modified_base 11: mod_base = OTHER; note = 2'-O-methyladenosine-3'-phosphate
  modified_base 12: mod_base = OTHER; note = 2'-O-methyluridine-3'-phosphate
  modified_base 13: mod_base = OTHER; note = 2'-O-methylguanosine-3'-phosphate
  modified_base 14: mod_base = OTHER; note = 2'-fluorouridine-3'-phosphate
  modified_base 15: mod_base = OTHER; note = 2'-O-methylcytidine-3'-phosphate
  modified_base 16: mod_base = OTHER; note = 2'-fluorouridine-3'-phosphate
  modified_base 17: mod_base = OTHER; note = 2'-O-methylguanosine-3'-phosphate
  modified_base 18: mod_base = OTHER; note = 2'-fluorocytidine-3'-phosphate
  modified_base 19: mod_base = OTHER; note = 2'-O-methyluridine-3'-phosphate
  modified_base 20: mod_base = OTHER; note = 2'-fluorouridine-3'-phosphate
  modified_base 21: mod_base = OTHER; note = 2'-O-methylguanosine-3'-phosphorothioate
  modified_base 22: mod_base = OTHER; note = 2'-fluorocytidine-3'-phosphorothioate
  modified_base 23: mod_base = OTHER; note = 2'-O-methyluridine-3'-phosphate
aaaaagataaatgtctgcttgct

SEQ ID NO: 173 - RNA, 21 nt, synthetic construct
  source 1..21: mol_type = other RNA; note = Description of Artificial Sequence: Synthetic oligonucleotide
  modified_base 1: mod_base = OTHER; note = 2'-fluorocytidine-3'-phosphate
  modified_base 2: mod_base = OTHER; note = 2'-O-methoxyethyladenosine-3'-phosphate
  modified_base 3: mod_base = OTHER; note = 2'-fluoroadenosine-3'-phosphate
  modified_base 4: mod_base = OTHER; note = 2'-O-methoxyethylguanosine-3'-phosphate
  modified_base 5: mod_base = OTHER; note = 2'-fluorocytidine-3'-phosphate
  modified_base 6: mod_base = OTHER; note = 2'-O-methyladenosine-3'-phosphate
  modified_base 7: mod_base = OTHER; note = 2'-fluoroguanosine-3'-phosphate
  modified_base 8: mod_base = OTHER; note = 2'-O-methyladenosine-3'-phosphate
  modified_base 9: mod_base = OTHER; note = 2'-fluorocytidine-3'-phosphate
  modified_base 10: mod_base = OTHER; note = 2'-fluoroadenosine-3'-phosphate
  modified_base 11: mod_base = OTHER; note = 2'-fluorouridine-3'-phosphate
  modified_base 12: mod_base = OTHER; note = 2'-O-methyluridine-3'-phosphate
  modified_base 13: mod_base = OTHER; note = 2'-fluorouridine-3'-phosphate
  modified_base 14: mod_base = OTHER; note = 2'-O-methyladenosine-3'-phosphate
  modified_base 15: mod_base = OTHER; note = 2'-fluorouridine-3'-phosphate
  modified_base 16: mod_base = OTHER; note = 2'-O-methylcytidine-3'-phosphate
  modified_base 17: mod_base = OTHER; note = 2'-fluorouridine-3'-phosphate
  modified_base 18: mod_base = OTHER; note = 2'-O-methoxyethyl-5-methyluridine-3'-phosphate
  modified_base 19: mod_base = OTHER; note = 2'-fluorouridine-3'-phosphate
  modified_base 20: mod_base = OTHER; note = 2'-O-methoxyethyl-5-methyluridine-3'-phosphate
  modified_base 21: mod_base = OTHER; note = 2'-fluorouridine-3'-phosphate N-[tris(GalNAc-alkyl)-amidodecanoyl)]-4-hydroxyprolinol Hyp-(GalNAc-alkyl)3
caagcagacatttatcttttt

SEQ ID NO: 174 - RNA, 23 nt, synthetic construct
  source 1..23: mol_type = other RNA; note = Description of Artificial Sequence: Synthetic oligonucleotide
  modified_base 1: mod_base = OTHER; note = 2'-O-methyladenosine-3'-phosphate
  modified_base 2: mod_base = OTHER; note = 2'-fluoroadenosine-3'-phosphate
  modified_base 3: mod_base = OTHER; note = 2'-O-methyladenosine-3'-phosphate
  modified_base 4: mod_base = OTHER; note = 2'-fluoroadenosine-3'-phosphate
  modified_base 5: mod_base = OTHER; note = 2'-O-methyladenosine-3'-phosphate
  modified_base 6: mod_base = OTHER; note = 2'-fluoroguanosine-3'-phosphate
  modified_base 7: mod_base = OTHER; note = 2'-O-methyladenosine-3'-phosphate
  modified_base 8: mod_base = OTHER; note = 2'-fluorouridine-3'-phosphate
  modified_base 9: mod_base = OTHER; note = 2'-O-methyladenosine-3'-phosphate
  modified_base 10: mod_base = OTHER; note = 2'-fluoroadenosine-3'-phosphate
  modified_base 11: mod_base = OTHER; note = 2'-O-methyladenosine-3'-phosphate
  modified_base 12: mod_base = OTHER; note = 2'-O-methyluridine-3'-phosphate
  modified_base 13: mod_base = OTHER; note = 2'-O-methylguanosine-3'-phosphate
  modified_base 14: mod_base = OTHER; note = 2'-fluorouridine-3'-phosphate
  modified_base 15: mod_base = OTHER; note = 2'-O-methylcytidine-3'-phosphate
  modified_base 16: mod_base = OTHER; note = 2'-fluorouridine-3'-phosphate
  modified_base 17: mod_base = OTHER; note = 2'-O-methylguanosine-3'-phosphate
  modified_base 18: mod_base = OTHER; note = 2'-fluorocytidine-3'-phosphate
  modified_base 19: mod_base = OTHER; note = 2'-O-methyluridine-3'-phosphate
  modified_base 20: mod_base = OTHER; note = 2'-fluorouridine-3'-phosphate
  modified_base 21: mod_base = OTHER; note = 2'-O-methylguanosine-3'-phosphorothioate
  modified_base 22: mod_base = OTHER; note = 2'-fluorocytidine-3'-phosphorothioate
  modified_base 23: mod_base = OTHER; note = 2'-O-methyluridine-3'-phosphate
aaaaagataaatgtctgcttgct

SEQ ID NO: 175 - RNA, 21 nt, synthetic construct
  source 1..21: mol_type = other RNA; note = Description of Artificial Sequence: Synthetic oligonucleotide
  modified_base 1: mod_base = OTHER; note = 2'-fluorocytidine-3'-phosphate
  modified_base 2: mod_base = OTHER; note = 2'-O-methoxyethyladenosine-3'-phosphate
  modified_base 3: mod_base = OTHER; note = 2'-fluoroadenosine-3'-phosphate
  modified_base 4: mod_base = OTHER; note = 2'-O-methoxyethylguanosine-3'-phosphate
  modified_base 5: mod_base = OTHER; note = 2'-fluorocytidine-3'-phosphate
  modified_base 6: mod_base = OTHER; note = 2'-O-methyladenosine-3'-phosphate
  modified_base 7: mod_base = OTHER; note = 2'-fluoroguanosine-3'-phosphate
  modified_base 8: mod_base = OTHER; note = 2'-O-methyladenosine-3'-phosphate
  modified_base 9: mod_base = OTHER; note = 2'-fluorocytidine-3'-phosphate
  modified_base 10: mod_base = OTHER; note = 2'-fluoroadenosine-3'-phosphate
  modified_base 11: mod_base = OTHER; note = 2'-fluorouridine-3'-phosphate
  modified_base 12: mod_base = OTHER; note = 2'-O-methyluridine-3'-phosphate
  modified_base 13: mod_base = OTHER; note = 2'-fluorouridine-3'-phosphate
  modified_base 14: mod_base = OTHER; note = 2'-O-methyladenosine-3'-phosphate
  modified_base 15: mod_base = OTHER; note = 2'-fluorouridine-3'-phosphate
  modified_base 16: mod_base = OTHER; note = 2'-O-methylcytidine-3'-phosphate
  modified_base 17: mod_base = OTHER; note = 2'-fluorouridine-3'-phosphate
  modified_base 18: mod_base = OTHER; note = 2'-O-methoxyethyl-5-methyluridine-3'-phosphate
  modified_base 19: mod_base = OTHER; note = 2'-fluorouridine-3'-phosphate
  modified_base 20: mod_base = OTHER; note = 2'-O-methoxyethyl-5-methyluridine-3'-phosphate
  modified_base 21: mod_base = OTHER; note = 2'-fluorouridine-3'-phosphate N-[tris(GalNAc-alkyl)-amidodecanoyl)]-4-hydroxyprolinol Hyp-(GalNAc-alkyl)3
caagcagacatttatcttttt

SEQ ID NO: 176 - RNA, 23 nt, synthetic construct
  source 1..23: mol_type = other RNA; note = Description of Artificial Sequence: Synthetic oligonucleotide
  modified_base 1: mod_base = OTHER; note = 2'-O-methyladenosine-3'-phosphate
  modified_base 2: mod_base = OTHER; note = 2'-fluoroadenosine-3'-phosphate
  modified_base 3: mod_base = OTHER; note = 2'-O-methyladenosine-3'-phosphate
  modified_base 4: mod_base = OTHER; note = 2'-fluoroadenosine-3'-phosphate
  modified_base 5: mod_base = OTHER; note = 2'-O-methyladenosine-3'-phosphate
  modified_base 6: mod_base = OTHER; note = 2'-fluoroguanosine-3'-phosphate
  modified_base 7: mod_base = OTHER; note = 2'-O-methyladenosine-3'-phosphate
  modified_base 8: mod_base = OTHER; note = 2'-fluorouridine-3'-phosphate
  modified_base 9: mod_base = OTHER; note = 2'-O-methyladenosine-3'-phosphate
  modified_base 10: mod_base = OTHER; note = 2'-fluoroadenosine-3'-phosphate
  modified_base 11: mod_base = OTHER; note = 2'-O-methyladenosine-3'-phosphate
  modified_base 12: mod_base = OTHER; note = 2'-O-methyluridine-3'-phosphate
  modified_base 13: mod_base = OTHER; note = 2'-O-methylguanosine-3'-phosphate
  modified_base 14: mod_base = OTHER; note = 2'-fluorouridine-3'-phosphate
  modified_base 15: mod_base = OTHER; note = 2'-O-methylcytidine-3'-phosphate
  modified_base 16: mod_base = OTHER; note = 2'-fluorouridine-3'-phosphate
  modified_base 17: mod_base = OTHER; note = 2'-O-methylguanosine-3'-phosphate
  modified_base 18: mod_base = OTHER; note = 2'-fluorocytidine-3'-phosphate
  modified_base 19: mod_base = OTHER; note = 2'-O-methyluridine-3'-phosphate
  modified_base 20: mod_base = OTHER; note = 2'-fluorouridine-3'-phosphate
  modified_base 21: mod_base = OTHER; note = 2'-O-methylguanosine-3'-phosphorothioate
  modified_base 22: mod_base = OTHER; note = 2'-fluorocytidine-3'-phosphorothioate
  modified_base 23: mod_base = OTHER; note = 2'-O-methyluridine-3'-phosphate
aaaaagataaatgtctgcttgct

SEQ ID NO: 177 - RNA, 21 nt, synthetic construct
  source 1..21: mol_type = other RNA; note = Description of Artificial Sequence: Synthetic oligonucleotide
  modified_base 1: mod_base = OTHER; note = 2'-fluorocytidine-3'-phosphate
  modified_base 2: mod_base = OTHER; note = 2'-O-methoxyethyladenosine-3'-phosphate
  modified_base 3: mod_base = OTHER; note = 2'-fluoroadenosine-3'-phosphate
  modified_base 4: mod_base = OTHER; note = 2'-O-methoxyethylguanosine-3'-phosphate
  modified_base 5: mod_base = OTHER; note = 2'-fluorocytidine-3'-phosphate
  modified_base 6: mod_base = OTHER; note = 2'-O-methyladenosine-3'-phosphate
  modified_base 7: mod_base = OTHER; note = 2'-fluoroguanosine-3'-phosphate
  modified_base 8: mod_base = OTHER; note = 2'-O-methyladenosine-3'-phosphate
  modified_base 9: mod_base = OTHER; note = 2'-fluorocytidine-3'-phosphate
  modified_base 10: mod_base = OTHER; note = 2'-fluoroadenosine-3'-phosphate
  modified_base 11: mod_base = OTHER; note = 2'-fluorouridine-3'-phosphate
  modified_base 12: mod_base = OTHER; note = 2'-O-methyluridine-3'-phosphate
  modified_base 13: mod_base = OTHER; note = 2'-fluorouridine-3'-phosphate
  modified_base 14: mod_base = OTHER; note = 2'-O-methyladenosine-3'-phosphate
  modified_base 15: mod_base = OTHER; note = 2'-fluorouridine-3'-phosphate
  modified_base 16: mod_base = OTHER; note = 2'-O-methylcytidine-3'-phosphate
  modified_base 17: mod_base = OTHER; note = 2'-fluorouridine-3'-phosphate
  modified_base 18: mod_base = OTHER; note = 2'-O-methoxyethyl-5-methyluridine-3'-phosphate
  modified_base 19: mod_base = OTHER; note = 2'-fluorouridine-3'-phosphate
  modified_base 20: mod_base = OTHER; note = 2'-O-methoxyethyl-5-methyluridine-3'-phosphate
  modified_base 21: mod_base = OTHER; note = 2'-fluorouridine-3'-phosphate N-[tris(GalNAc-alkyl)-amidodecanoyl)]-4-hydroxyprolinol Hyp-(GalNAc-alkyl)3
caagcagacatttatcttttt

SEQ ID NO: 178 - RNA, 23 nt, synthetic construct
  source 1..23: mol_type = other RNA; note = Description of Artificial Sequence: Synthetic oligonucleotide
  modified_base 1: mod_base = OTHER; note = 2'-O-methyladenosine-3'-phosphate
  modified_base 2: mod_base = OTHER; note = 2'-fluoroadenosine-3'-phosphate
  modified_base 3: mod_base = OTHER; note = 2'-O-methyladenosine-3'-phosphate
  modified_base 4: mod_base = OTHER; note = 2'-fluoroadenosine-3'-phosphate
  modified_base 5: mod_base = OTHER; note = 2'-O-methyladenosine-3'-phosphate
  modified_base 6: mod_base = OTHER; note = 2'-fluoroguanosine-3'-phosphate
  modified_base 7: mod_base = OTHER; note = 2'-O-methyladenosine-3'-phosphate
  modified_base 8: mod_base = OTHER; note = 2'-fluorouridine-3'-phosphate
  modified_base 9: mod_base = OTHER; note = 2'-O-methyladenosine-3'-phosphate
  modified_base 10: mod_base = OTHER; note = 2'-fluoroadenosine-3'-phosphate
  modified_base 11: mod_base = OTHER; note = 2'-O-methyladenosine-3'-phosphate
  modified_base 12: mod_base = OTHER; note = 2'-O-methyluridine-3'-phosphate
  modified_base 13: mod_base = OTHER; note = 2'-O-methylguanosine-3'-phosphate
  modified_base 14: mod_base = OTHER; note = 2'-fluorouridine-3'-phosphate
  modified_base 15: mod_base = OTHER; note = 2'-O-methylcytidine-3'-phosphate
  modified_base 16: mod_base = OTHER; note = 2'-fluorouridine-3'-phosphate
  modified_base 17: mod_base = OTHER; note = 2'-O-methylguanosine-3'-phosphate
  modified_base 18: mod_base = OTHER; note = 2'-fluorocytidine-3'-phosphate
  modified_base 19: mod_base = OTHER; note = 2'-O-methyluridine-3'-phosphate
  modified_base 20: mod_base = OTHER; note = 2'-fluorouridine-3'-phosphate
  modified_base 21: mod_base = OTHER; note = 2'-O-methylguanosine-3'-phosphorothioate
  modified_base 22: mod_base = OTHER; note = 2'-fluorocytidine-3'-phosphorothioate
  modified_base 23: mod_base = OTHER; note = 2'-O-methyluridine-3'-phosphate
aaaaagataaatgtctgcttgct

SEQ ID NO: 179 - RNA, 21 nt, synthetic construct
  source 1..21: mol_type = other RNA; note = Description of Artificial Sequence: Synthetic oligonucleotide
  modified_base 1: mod_base = OTHER; note = 2'-fluorocytidine-3'-phosphate
  modified_base 2: mod_base = OTHER; note = 2'-O-methoxyethyladenosine-3'-phosphate
  modified_base 3: mod_base = OTHER; note = 2'-fluoroadenosine-3'-phosphate
  modified_base 4: mod_base = OTHER; note = 2'-O-methoxyethylguanosine-3'-phosphate
  modified_base 5: mod_base = OTHER; note = 2'-fluorocytidine-3'-phosphate
  modified_base 6: mod_base = OTHER; note = 2'-O-methyladenosine-3'-phosphate
  modified_base 7: mod_base = OTHER; note = 2'-fluoroguanosine-3'-phosphate
  modified_base 8: mod_base = OTHER; note = 2'-O-methyladenosine-3'-phosphate
  modified_base 9: mod_base = OTHER; note = 2'-fluorocytidine-3'-phosphate
  modified_base 10: mod_base = OTHER; note = 2'-fluoroadenosine-3'-phosphate
  modified_base 11: mod_base = OTHER; note = 2'-fluorouridine-3'-phosphate
  modified_base 12: mod_base = OTHER; note = 2'-O-methyluridine-3'-phosphate
  modified_base 13: mod_base = OTHER; note = 2'-fluorouridine-3'-phosphate
  modified_base 14: mod_base = OTHER; note = 2'-O-methoxyethyladenosine-3'-phosphate
  modified_base 15: mod_base = OTHER; note = 2'-fluorouridine-3'-phosphate
  modified_base 16: mod_base = OTHER; note = 2'-O-methoxyethyl-5-methylcytidine-3'-phosphate
  modified_base 17: mod_base = OTHER; note = 2'-fluorouridine-3'-phosphate
  modified_base 18: mod_base = OTHER; note = 2'-O-methoxyethyl-5-methyluridine-3'-phosphate
  modified_base 19: mod_base = OTHER; note = 2'-fluorouridine-3'-phosphate
  modified_base 20: mod_base = OTHER; note = 2'-O-methoxyethyl-5-methyluridine-3'-phosphate
  modified_base 21: mod_base = OTHER; note = 2'-fluorouridine-3'-phosphate N-[tris(GalNAc-alkyl)-amidodecanoyl)]-4-hydroxyprolinol Hyp-(GalNAc-alkyl)3
caagcagacatttatcttttt

SEQ ID NO: 180 - RNA, 23 nt, synthetic construct
  source 1..23: mol_type = other RNA; note = Description of Artificial Sequence: Synthetic oligonucleotide
  modified_base 1: mod_base = OTHER; note = 2'-O-methyladenosine-3'-phosphate
  modified_base 2: mod_base = OTHER; note = 2'-fluoroadenosine-3'-phosphate
  modified_base 3: mod_base = OTHER; note = 2'-O-methyladenosine-3'-phosphate
  modified_base 4: mod_base = OTHER; note = 2'-fluoroadenosine-3'-phosphate
  modified_base 5: mod_base = OTHER; note = 2'-O-methyladenosine-3'-phosphate
  modified_base 6: mod_base = OTHER; note = 2'-fluoroguanosine-3'-phosphate
  modified_base 7: mod_base = OTHER; note = 2'-O-methyladenosine-3'-phosphate
  modified_base 8: mod_base = OTHER; note = 2'-fluorouridine-3'-phosphate
  modified_base 9: mod_base = OTHER; note = 2'-O-methyladenosine-3'-phosphate
  modified_base 10: mod_base = OTHER; note = 2'-fluoroadenosine-3'-phosphate
  modified_base 11: mod_base = OTHER; note = 2'-O-methyladenosine-3'-phosphate
  modified_base 12: mod_base = OTHER; note = 2'-O-methyluridine-3'-phosphate
  modified_base 13: mod_base = OTHER; note = 2'-O-methylguanosine-3'-phosphate
  modified_base 14: mod_base = OTHER; note = 2'-fluorouridine-3'-phosphate
  modified_base 15: mod_base = OTHER; note = 2'-O-methylcytidine-3'-phosphate
  modified_base 16: mod_base = OTHER; note = 2'-fluorouridine-3'-phosphate
  modified_base 17: mod_base = OTHER; note = 2'-O-methylguanosine-3'-phosphate
  modified_base 18: mod_base = OTHER; note = 2'-fluorocytidine-3'-phosphate
  modified_base 19: mod_base = OTHER; note = 2'-O-methyluridine-3'-phosphate
  modified_base 20: mod_base = OTHER; note = 2'-fluorouridine-3'-phosphate
  modified_base 21: mod_base = OTHER; note = 2'-O-methylguanosine-3'-phosphorothioate
  modified_base 22: mod_base = OTHER; note = 2'-fluorocytidine-3'-phosphorothioate
  modified_base 23: mod_base = OTHER; note = 2'-O-methyluridine-3'-phosphate
aaaaagataaatgtctgcttgct

SEQ ID NO: 181 - RNA, 21 nt, synthetic construct
  source 1..21: mol_type = other RNA; note = Description of Artificial Sequence: Synthetic oligonucleotide
  modified_base 1: mod_base = OTHER; note = 2'-fluorocytidine-3'-phosphate
  modified_base 2: mod_base = OTHER; note = 2'-O-methoxyethyladenosine-3'-phosphate
  modified_base 3: mod_base = OTHER; note = 2'-fluoroadenosine-3'-phosphate
  modified_base 4: mod_base = OTHER; note = 2'-O-methoxyethylguanosine-3'-phosphate
  modified_base 5: mod_base = OTHER; note = 2'-fluorocytidine-3'-phosphate
  modified_base 6: mod_base = OTHER; note = 2'-O-methyladenosine-3'-phosphate
  modified_base 7: mod_base = OTHER; note = 2'-fluoroguanosine-3'-phosphate
  modified_base 8: mod_base = OTHER; note = 2'-O-methyladenosine-3'-phosphate
  modified_base 9: mod_base = OTHER; note = 2'-fluorocytidine-3'-phosphate
  modified_base 10: mod_base = OTHER; note = 2'-fluoroadenosine-3'-phosphate
  modified_base 11: mod_base = OTHER; note = 2'-fluorouridine-3'-phosphate
  modified_base 12: mod_base = OTHER; note = 2'-O-methyluridine-3'-phosphate
  modified_base 13: mod_base = OTHER; note = 2'-fluorouridine-3'-phosphate
  modified_base 14: mod_base = OTHER; note = 2'-O-methoxyethyladenosine-3'-phosphate
  modified_base 15: mod_base = OTHER; note = 2'-fluorouridine-3'-phosphate
  modified_base 16: mod_base = OTHER; note = 2'-O-methoxyethyl-5-methylcytidine-3'-phosphate
  modified_base 17: mod_base = OTHER; note = 2'-fluorouridine-3'-phosphate
  modified_base 18: mod_base = OTHER; note = 2'-O-methoxyethyl-5-methyluridine-3'-phosphate
  modified_base 19: mod_base = OTHER; note = 2'-fluorouridine-3'-phosphate
  modified_base 20: mod_base = OTHER; note = 2'-O-methoxyethyl-5-methyluridine-3'-phosphate
  modified_base 21: mod_base = OTHER; note = 2'-fluorouridine-3'-phosphate N-[tris(GalNAc-alkyl)-amidodecanoyl)]-4-hydroxyprolinol Hyp-(GalNAc-alkyl)3
caagcagacatttatcttttt

SEQ ID NO: 182 - RNA, 23 nt, synthetic construct
  source 1..23: mol_type = other RNA; note = Description of Artificial Sequence: Synthetic oligonucleotide
  modified_base 1: mod_base = OTHER; note = 2'-O-methyladenosine-3'-phosphate
  modified_base 2: mod_base = OTHER; note = 2'-fluoroadenosine-3'-phosphate
  modified_base 3: mod_base = OTHER; note = 2'-O-methyladenosine-3'-phosphate
  modified_base 4: mod_base = OTHER; note = 2'-fluoroadenosine-3'-phosphate
  modified_base 5: mod_base = OTHER; note = 2'-O-methyladenosine-3'-phosphate
  modified_base 6: mod_base = OTHER; note = 2'-fluoroguanosine-3'-phosphate
  modified_base 7: mod_base = OTHER; note = 2'-O-methyladenosine-3'-phosphate
  modified_base 8: mod_base = OTHER; note = 2'-fluorouridine-3'-phosphate
  modified_base 9: mod_base = OTHER; note = 2'-O-methyladenosine-3'-phosphate
  modified_base 10: mod_base = OTHER; note = 2'-fluoroadenosine-3'-phosphate
  modified_base 11: mod_base = OTHER; note = 2'-O-methyladenosine-3'-phosphate
  modified_base 12: mod_base = OTHER; note = 2'-O-methyluridine-3'-phosphate
  modified_base 13: mod_base = OTHER; note = 2'-O-methylguanosine-3'-phosphate
  modified_base 14: mod_base = OTHER; note = 2'-fluorouridine-3'-phosphate
  modified_base 15: mod_base = OTHER; note = 2'-O-methylcytidine-3'-phosphate
  modified_base 16: mod_base = OTHER; note = 2'-fluorouridine-3'-phosphate
  modified_base 17: mod_base = OTHER; note = 2'-O-methylguanosine-3'-phosphate
  modified_base 18: mod_base = OTHER; note = 2'-fluorocytidine-3'-phosphate
  modified_base 19: mod_base = OTHER; note = 2'-O-methyluridine-3'-phosphate
  modified_base 20: mod_base = OTHER; note = 2'-fluorouridine-3'-phosphate
  modified_base 21: mod_base = OTHER; note = 2'-O-methylguanosine-3'-phosphorothioate
  modified_base 22: mod_base = OTHER; note = 2'-fluorocytidine-3'-phosphorothioate
  modified_base 23: mod_base = OTHER; note = 2'-O-methyluridine-3'-phosphate
aaaaagataaatgtctgcttgct

SEQ ID NO: 183 - RNA, 21 nt, synthetic construct
  source 1..21: mol_type = other RNA; note = Description of Artificial Sequence: Synthetic oligonucleotide
  modified_base 1: mod_base = OTHER; note = 2'-fluorocytidine-3'-phosphate
  modified_base 2: mod_base = OTHER; note = 2'-O-methoxyethyladenosine-3'-phosphate
  modified_base 3: mod_base = OTHER; note = 2'-fluoroadenosine-3'-phosphate
  modified_base 4: mod_base = OTHER; note = 2'-O-methoxyethylguanosine-3'-phosphate
  modified_base 5: mod_base = OTHER; note = 2'-fluorocytidine-3'-phosphate
  modified_base 6: mod_base = OTHER; note = 2'-O-methyladenosine-3'-phosphate
  modified_base 7: mod_base = OTHER; note = 2'-fluoroguanosine-3'-phosphate
  modified_base 8: mod_base = OTHER; note = 2'-O-methyladenosine-3'-phosphate
  modified_base 9: mod_base = OTHER; note = 2'-fluorocytidine-3'-phosphate
  modified_base 10: mod_base = OTHER; note = 2'-fluoroadenosine-3'-phosphate
  modified_base 11: mod_base = OTHER; note = 2'-fluorouridine-3'-phosphate
  modified_base 12: mod_base = OTHER; note = 2'-O-methyluridine-3'-phosphate
  modified_base 13: mod_base = OTHER; note = 2'-fluorouridine-3'-phosphate
  modified_base 14: mod_base = OTHER; note = 2'-O-methoxyethyladenosine-3'-phosphate
  modified_base 15: mod_base = OTHER; note = 2'-fluorouridine-3'-phosphate
  modified_base 16: mod_base = OTHER; note = 2'-O-methoxyethyl-5-methylcytidine-3'-phosphate
  modified_base 17: mod_base = OTHER; note = 2'-fluorouridine-3'-phosphate
  modified_base 18: mod_base = OTHER; note = 2'-O-methoxyethyl-5-methyluridine-3'-phosphate
  modified_base 19: mod_base = OTHER; note = 2'-fluorouridine-3'-phosphate
  modified_base 20: mod_base = OTHER; note = 2'-O-methoxyethyl-5-methyluridine-3'-phosphate
  modified_base 21: mod_base = OTHER; note = 2'-fluorouridine-3'-phosphate N-[tris(GalNAc-alkyl)-amidodecanoyl)]-4-hydroxyprolinol Hyp-(GalNAc-alkyl)3
caagcagacatttatcttttt

SEQ ID NO: 184 - RNA, 23 nt, synthetic construct
  source 1..23: mol_type = other RNA; note = Description of Artificial Sequence: Synthetic oligonucleotide
  modified_base 1: mod_base = OTHER; note = 2'-O-methyladenosine-3'-phosphate
  modified_base 2: mod_base = OTHER; note = 2'-fluoroadenosine-3'-phosphate
  modified_base 3: mod_base = OTHER; note = 2'-O-methyladenosine-3'-phosphate
  modified_base 4: mod_base = OTHER; note = 2'-fluoroadenosine-3'-phosphate
  modified_base 5: mod_base = OTHER; note = 2'-O-methyladenosine-3'-phosphate
  modified_base 6: mod_base = OTHER; note = 2'-fluoroguanosine-3'-phosphate
  modified_base 7: mod_base = OTHER; note = 2'-O-methyladenosine-3'-phosphate
  modified_base 8: mod_base = OTHER; note = 2'-fluorouridine-3'-phosphate
  modified_base 9: mod_base = OTHER; note = 2'-O-methyladenosine-3'-phosphate
  modified_base 10: mod_base = OTHER; note = 2'-fluoroadenosine-3'-phosphate
  modified_base 11: mod_base = OTHER; note = 2'-O-methyladenosine-3'-phosphate
  modified_base 12: mod_base = OTHER; note = 2'-O-methyluridine-3'-phosphate
  modified_base 13: mod_base = OTHER; note = 2'-O-methylguanosine-3'-phosphate
  modified_base 14: mod_base = OTHER; note = 2'-fluorouridine-3'-phosphate
  modified_base 15: mod_base = OTHER; note = 2'-O-methylcytidine-3'-phosphate
  modified_base 16: mod_base = OTHER; note = 2'-fluorouridine-3'-phosphate
  modified_base 17: mod_base = OTHER; note = 2'-O-methylguanosine-3'-phosphate
  modified_base 18: mod_base = OTHER; note = 2'-fluorocytidine-3'-phosphate
  modified_base 19: mod_base = OTHER; note = 2'-O-methyluridine-3'-phosphate
  modified_base 20: mod_base = OTHER; note = 2'-fluorouridine-3'-phosphate
  modified_base 21: mod_base = OTHER; note = 2'-O-methylguanosine-3'-phosphorothioate
  modified_base 22: mod_base = OTHER; note = 2'-fluorocytidine-3'-phosphorothioate
  modified_base 23: mod_base = OTHER; note = 2'-O-methyluridine-3'-phosphate
aaaaagataaatgtctgcttgct

SEQ ID NO: 185 - RNA, 21 nt, synthetic construct
  source 1..21: mol_type = other RNA; note = Description of Artificial Sequence: Synthetic oligonucleotide
  modified_base 1: mod_base = OTHER; note = 2'-fluorocytidine-3'-phosphate
  modified_base 2: mod_base = OTHER; note = 2'-O-methoxyethyladenosine-3'-phosphate
  modified_base 3: mod_base = OTHER; note = 2'-fluoroadenosine-3'-phosphate
  modified_base 4: mod_base = OTHER; note = 2'-O-methoxyethylguanosine-3'-phosphate
  modified_base 5: mod_base = OTHER; note = 2'-fluorocytidine-3'-phosphate
  modified_base 6: mod_base = OTHER; note = 2'-O-methyladenosine-3'-phosphate
  modified_base 7: mod_base = OTHER; note = 2'-fluoroguanosine-3'-phosphate
  modified_base 8: mod_base = OTHER; note = 2'-O-methyladenosine-3'-phosphate
  modified_base 9: mod_base = OTHER; note = 2'-fluorocytidine-3'-phosphate
  modified_base 10: mod_base = OTHER; note = 2'-fluoroadenosine-3'-phosphate
  modified_base 11: mod_base = OTHER; note = 2'-fluorouridine-3'-phosphate
  modified_base 12: mod_base = OTHER; note = 2'-O-methyluridine-3'-phosphate
  modified_base 13: mod_base = OTHER; note = 2'-fluorouridine-3'-phosphate
  modified_base 14: mod_base = OTHER; note = 2'-O-methyladenosine-3'-phosphate
  modified_base 15: mod_base = OTHER; note = 2'-fluorouridine-3'-phosphate
  modified_base 16: mod_base = OTHER; note = 2'-O-methylcytidine-3'-phosphate
  modified_base 17: mod_base = OTHER; note = 2'-fluorouridine-3'-phosphate
  modified_base 18: mod_base = OTHER; note = 2'-O-methoxyethyl-5-methyluridine-3'-phosphate
  modified_base 19: mod_base = OTHER; note = 2'-fluorouridine-3'-phosphate
  modified_base 20: mod_base = OTHER; note = 2'-O-methoxyethyl-5-methyluridine-3'-phosphate
  modified_base 21: mod_base = OTHER; note = beta-L-uridine-3'-phosphate N-[tris(GalNAc-alkyl)-amidodecanoyl)]-4-hydroxyprolinol Hyp-(GalNAc-alkyl)3
caagcagacatttatcttttt

SEQ ID NO: 186 - RNA, 23 nt, synthetic construct
  source 1..23: mol_type = other RNA; note = Description of Artificial Sequence: Synthetic oligonucleotide
  modified_base 1: mod_base = OTHER; note = 2'-O-methyladenosine-3'-phosphate
  modified_base 2: mod_base = OTHER; note = 2'-fluoroadenosine-3'-phosphate
  modified_base 3: mod_base = OTHER; note = 2'-O-methyladenosine-3'-phosphate
  modified_base 4: mod_base = OTHER; note = 2'-fluoroadenosine-3'-phosphate
  modified_base 5: mod_base = OTHER; note = 2'-O-methyladenosine-3'-phosphate
  modified_base 6: mod_base = OTHER; note = 2'-fluoroguanosine-3'-phosphate
  modified_base 7: mod_base = OTHER; note = 2'-O-methyladenosine-3'-phosphate
  modified_base 8: mod_base = OTHER; note = 2'-fluorouridine-3'-phosphate
  modified_base 9: mod_base = OTHER; note = 2'-O-methyladenosine-3'-phosphate
  modified_base 10: mod_base = OTHER; note = 2'-fluoroadenosine-3'-phosphate
  modified_base 11: mod_base = OTHER; note = 2'-O-methyladenosine-3'-phosphate
  modified_base 12: mod_base = OTHER; note = 2'-O-methyluridine-3'-phosphate
  modified_base 13: mod_base = OTHER; note = 2'-O-methylguanosine-3'-phosphate
  modified_base 14: mod_base = OTHER; note = 2'-fluorouridine-3'-phosphate
  modified_base 15: mod_base = OTHER; note = 2'-O-methylcytidine-3'-phosphate
  modified_base 16: mod_base = OTHER; note = 2'-fluorouridine-3'-phosphate
  modified_base 17: mod_base = OTHER; note = 2'-O-methylguanosine-3'-phosphate
  modified_base 18: mod_base = OTHER; note = 2'-fluorocytidine-3'-phosphate
  modified_base 19: mod_base = OTHER; note = 2'-O-methyluridine-3'-phosphate
  modified_base 20: mod_base = OTHER; note = 2'-fluorouridine-3'-phosphate
  modified_base 21: mod_base = OTHER; note = 2'-O-methylguanosine-3'-phosphorothioate
  modified_base 22: mod_base = OTHER; note = 2'-fluorocytidine-3'-phosphorothioate
  modified_base 23: mod_base = OTHER; note = 2'-O-methyluridine-3'-phosphate
aaaaagataaatgtctgcttgct

SEQ ID NO: 187 - RNA, 21 nt, synthetic construct
  source 1..21: mol_type = other RNA; note = Description of Artificial Sequence: Synthetic oligonucleotide
  modified_base 1: mod_base = OTHER; note = 2'-fluorocytidine-3'-phosphate
  modified_base 2: mod_base = OTHER; note = 2'-O-methoxyethyladenosine-3'-phosphate
  modified_base 3: mod_base = OTHER; note = 2'-fluoroadenosine-3'-phosphate
  modified_base 4: mod_base = OTHER; note = 2'-O-methoxyethylguanosine-3'-phosphate
  modified_base 5: mod_base = OTHER; note = 2'-fluorocytidine-3'-phosphate
  modified_base 6: mod_base = OTHER; note = 2'-O-methyladenosine-3'-phosphate
  modified_base 7: mod_base = OTHER; note = 2'-fluoroguanosine-3'-phosphate
  modified_base 8: mod_base = OTHER; note = 2'-O-methyladenosine-3'-phosphate
  modified_base 9: mod_base = OTHER; note = 2'-fluorocytidine-3'-phosphate
  modified_base 10: mod_base = OTHER; note = 2'-fluoroadenosine-3'-phosphate
  modified_base 11: mod_base = OTHER; note = 2'-fluorouridine-3'-phosphate
  modified_base 12: mod_base = OTHER; note = 2'-O-methyluridine-3'-phosphate
  modified_base 13: mod_base = OTHER; note = 2'-fluorouridine-3'-phosphate
  modified_base 14: mod_base = OTHER; note = 2'-O-methoxyethyladenosine-3'-phosphate
  modified_base 15: mod_base = OTHER; note = 2'-fluorouridine-3'-phosphate
  modified_base 16: mod_base = OTHER; note = 2'-O-methoxyethyl-5-methylcytidine-3'-phosphate
  modified_base 17: mod_base = OTHER; note = 2'-fluorouridine-3'-phosphate
  modified_base 18: mod_base = OTHER; note = 2'-O-methoxyethyl-5-methyluridine-3'-phosphate
  modified_base 19: mod_base = OTHER; note = 2'-fluorouridine-3'-phosphate
  modified_base 20: mod_base = OTHER; note = 2'-O-methoxyethyl-5-methyluridine-3'-phosphate
  modified_base 21: mod_base = OTHER; note = beta-L-uridine-3'-phosphate N-[tris(GalNAc-alkyl)-amidodecanoyl)]-4-hydroxyprolinol Hyp-(GalNAc-alkyl)3
caagcagacatttatcttttt

SEQ ID NO: 188 - RNA, 23 nt, synthetic construct
  source 1..23: mol_type = other RNA; note = Description of Artificial Sequence: Synthetic oligonucleotide
  modified_base 1: mod_base = OTHER; note = 2'-O-methyladenosine-3'-phosphate
  modified_base 2: mod_base = OTHER; note = 2'-fluoroadenosine-3'-phosphate
  modified_base 3: mod_base = OTHER; note = 2'-O-methyladenosine-3'-phosphate
  modified_base 4: mod_base = OTHER; note = 2'-fluoroadenosine-3'-phosphate
  modified_base 5: mod_base = OTHER; note = 2'-O-methyladenosine-3'-phosphate
  modified_base 6: mod_base = OTHER; note = 2'-fluoroguanosine-3'-phosphate
  modified_base 7: mod_base = OTHER; note = 2'-O-methyladenosine-3'-phosphate
  modified_base 8: mod_base = OTHER; note = 2'-fluorouridine-3'-phosphate
  modified_base 9: mod_base = OTHER; note = 2'-O-methyladenosine-3'-phosphate
  modified_base 10: mod_base = OTHER; note = 2'-fluoroadenosine-3'-phosphate
  modified_base 11: mod_base = OTHER; note = 2'-O-methyladenosine-3'-phosphate
  modified_base 12: mod_base = OTHER; note = 2'-O-methyluridine-3'-phosphate
  modified_base 13: mod_base = OTHER; note = 2'-O-methylguanosine-3'-phosphate
  modified_base 14: mod_base = OTHER; note = 2'-fluorouridine-3'-phosphate
  modified_base 15: mod_base = OTHER; note = 2'-O-methylcytidine-3'-phosphate
  modified_base 16: mod_base = OTHER; note = 2'-fluorouridine-3'-phosphate
  modified_base 17: mod_base = OTHER; note = 2'-O-methylguanosine-3'-phosphate
  modified_base 18: mod_base = OTHER; note = 2'-fluorocytidine-3'-phosphate
  modified_base 19: mod_base = OTHER; note = 2'-O-methyluridine-3'-phosphate
  modified_base 20: mod_base = OTHER; note = 2'-fluorouridine-3'-phosphate
  modified_base 21: mod_base = OTHER; note = 2'-O-methylguanosine-3'-phosphorothioate
  modified_base 22: mod_base = OTHER; note = 2'-fluorocytidine-3'-phosphorothioate
  modified_base 23: mod_base = OTHER; note = 2'-O-methyluridine-3'-phosphate
aaaaagataaatgtctgcttgct

SEQ ID NO: 189 - RNA, 21 nt, synthetic construct
  source 1..21: mol_type = other RNA; note = Description of Artificial Sequence: Synthetic oligonucleotide
  modified_base 1: mod_base = OTHER; note = 2'-fluoroadenosine-3'-phosphate
  modified_base 2: mod_base = OTHER; note = 2'-O-methyladenosine-3'-phosphate
  modified_base 3: mod_base = OTHER; note = 2'-fluoroguanosine-3'-phosphate
  modified_base 4: mod_base = OTHER; note = 2'-O-methylcytidine-3'-phosphate
  modified_base 5: mod_base = OTHER; note = 2'-fluoroadenosine-3'-phosphate
  modified_base 6: mod_base = OTHER; note = 2'-O-methylguanosine-3'-phosphate
  modified_base 7: mod_base = OTHER; note = 2'-fluoroadenosine-3'-phosphate
  modified_base 8: mod_base = OTHER; note = 2'-O-methylcytidine-3'-phosphate
  modified_base 9: mod_base = OTHER; note = 2'-fluoroadenosine-3'-phosphate
  modified_base 10: mod_base = OTHER; note = 2'-fluorouridine-3'-phosphate
  modified_base 11: mod_base = OTHER; note = 2'-fluorouridine-3'-phosphate
  modified_base 12: mod_base = OTHER; note = 2'-O-methyluridine-3'-phosphate
  modified_base 13: mod_base = OTHER; note = 2'-fluoroadenosine-3'-phosphate
  modified_base 14: mod_base = OTHER; note = 2'-O-methyluridine-3'-phosphate
  modified_base 15: mod_base = OTHER; note = 2'-fluorocytidine-3'-phosphate
  modified_base 16: mod_base = OTHER; note = 2'-O-methyluridine-3'-phosphate
  modified_base 17: mod_base = OTHER; note = 2'-fluorouridine-3'-phosphate
  modified_base 18: mod_base = OTHER; note = 2'-O-methyluridine-3'-phosphate
  modified_base 19: mod_base = OTHER; note = 2'-fluorouridine-3'-phosphate
  modified_base 20: mod_base = OTHER; note = 2'-O-methylguanosine-3'-phosphate
  modified_base 21: mod_base = OTHER; note = 2'-fluoroadenosine-3'-phosphate N-[tris(GalNAc-alkyl)-amidodecanoyl)]-4-hydroxyprolinol Hyp-(GalNAc-alkyl)3
aagcagacatttatcttttga

SEQ ID NO: 190 - RNA, 23 nt, synthetic construct
  source 1..23: mol_type = other RNA; note = Description of Artificial Sequence: Synthetic oligonucleotide
  modified_base 1: mod_base = OTHER; note = 2'-O-methyluridine-3'-phosphate
  modified_base 2: mod_base = OTHER; note = 2'-fluorocytidine-3'-phosphate
  modified_base 3: mod_base = OTHER; note = 2'-O-methyladenosine-3'-phosphate
  modified_base 4: mod_base = OTHER; note = 2'-fluoroadenosine-3'-phosphate
  modified_base 5: mod_base = OTHER; note = 2'-O-methyladenosine-3'-phosphate
  modified_base 6: mod_base = OTHER; note = 2'-fluoroadenosine-3'-phosphate
  modified_base 7: mod_base = OTHER; note = 2'-O-methylguanosine-3'-phosphate
  modified_base 8: mod_base = OTHER; note = 2'-fluoroadenosine-3'-phosphate
  modified_base 9: mod_base = OTHER; note = 2'-O-methyluridine-3'-phosphate
  modified_base 10: mod_base = OTHER; note = 2'-fluoroadenosine-3'-phosphate
  modified_base 11: mod_base = OTHER; note = 2'-O-methyladenosine-3'-phosphate
  modified_base 12: mod_base = OTHER; note = 2'-O-methyladenosine-3'-phosphate
  modified_base 13: mod_base = OTHER; note = 2'-O-methyluridine-3'-phosphate
  modified_base 14: mod_base = OTHER; note = 2'-fluoroguanosine-3'-phosphate
  modified_base 15: mod_base = OTHER; note = 2'-O-methyluridine-3'-phosphate
  modified_base 16: mod_base = OTHER; note = 2'-fluorocytidine-3'-phosphate
  modified_base 17: mod_base = OTHER; note = 2'-O-methyluridine-3'-phosphate
  modified_base 18: mod_base = OTHER; note = 2'-fluoroguanosine-3'-phosphate
  modified_base 19: mod_base = OTHER; note = 2'-O-methylcytidine-3'-phosphate
  modified_base 20: mod_base = OTHER; note = 2'-fluorouridine-3'-phosphate
  modified_base 21: mod_base = OTHER; note = 2'-O-methyluridine-3'-phosphorothioate
  modified_base 22: mod_base = OTHER; note = 2'-fluoroguanosine-3'-phosphorothioate
  modified_base 23: mod_base = OTHER; note = 2'-O-methylcytidine-3'-phosphate
tcaaaagataaatgtctgcttgc

SEQ ID NO: 191 - RNA, 21 nt, synthetic construct
  source 1..21: mol_type = other RNA; note = Description of Artificial Sequence: Synthetic oligonucleotide
  modified_base 1: mod_base = OTHER; note = 2'-fluoroadenosine-3'-phosphate
  modified_base 2: mod_base = OTHER; note = 2'-O-methylguanosine-3'-phosphate
  modified_base 3: mod_base = OTHER; note = 2'-fluorocytidine-3'-phosphate
  modified_base 4: mod_base = OTHER; note = 2'-O-methyladenosine-3'-phosphate
  modified_base 5: mod_base = OTHER; note = 2'-fluoroguanosine-3'-phosphate
  modified_base 6: mod_base = OTHER; note = 2'-O-methyladenosine-3'-phosphate
  modified_base 7: mod_base = OTHER; note = 2'-fluorocytidine-3'-phosphate
  modified_base 8: mod_base = OTHER; note = 2'-O-methyladenosine-3'-phosphate
  modified_base 9: mod_base = OTHER; note = 2'-fluorouridine-3'-phosphate
  modified_base 10: mod_base = OTHER; note = 2'-fluorouridine-3'-phosphate
  modified_base 11: mod_base = OTHER; note = 2'-fluorouridine-3'-phosphate
  modified_base 12: mod_base = OTHER; note = 2'-O-methyladenosine-3'-phosphate
  modified_base 13: mod_base = OTHER; note = 2'-fluorouridine-3'-phosphate
  modified_base 14: mod_base = OTHER; note = 2'-O-methylcytidine-3'-phosphate
  modified_base 15: mod_base = OTHER; note = 2'-fluorouridine-3'-phosphate
  modified_base 16: mod_base = OTHER; note = 2'-O-methyluridine-3'-phosphate
  modified_base 17: mod_base = OTHER; note = 2'-fluorouridine-3'-phosphate
  modified_base 18: mod_base = OTHER; note = 2'-O-methyluridine-3'-phosphate
  modified_base 19: mod_base = OTHER; note = 2'-fluoroguanosine-3'-phosphate
  modified_base 20: mod_base = OTHER; note = 2'-O-methylguanosine-3'-phosphate
  modified_base 21: mod_base = OTHER; note = 2'-fluoroadenosine-3'-phosphate N-[tris(GalNAc-alkyl)-amidodecanoyl)]-4-hydroxyprolinol Hyp-(GalNAc-alkyl)3
agcagacatttatcttttgga

SEQ ID NO: 192 - RNA, 23 nt, synthetic construct
  source 1..23: mol_type = other RNA; note = Description of Artificial Sequence: Synthetic oligonucleotide
  modified_base 1: mod_base = OTHER; note = 2'-O-methyluridine-3'-phosphate
  modified_base 2: mod_base = OTHER; note = 2'-fluorocytidine-3'-phosphate
  modified_base 3: mod_base = OTHER; note = 2'-O-methylcytidine-3'-phosphate
  modified_base 4: mod_base = OTHER; note = 2'-fluoroadenosine-3'-phosphate
  modified_base 5: mod_base = OTHER; note = 2'-O-methyladenosine-3'-phosphate
  modified_base 6: mod_base = OTHER; note = 2'-fluoroadenosine-3'-phosphate
  modified_base 7: mod_base = OTHER; note = 2'-O-methyladenosine-3'-phosphate
  modified_base 8: mod_base = OTHER; note = 2'-fluoroguanosine-3'-phosphate
  modified_base 9: mod_base = OTHER; note = 2'-O-methyladenosine-3'-phosphate
  modified_base 10: mod_base = OTHER; note = 2'-fluorouridine-3'-phosphate
  modified_base 11: mod_base = OTHER; note = 2'-O-methyladenosine-3'-phosphate
  modified_base 12: mod_base = OTHER; note = 2'-O-methyladenosine-3'-phosphate
  modified_base 13: mod_base = OTHER; note = 2'-O-methyladenosine-3'-phosphate
  modified_base 14: mod_base = OTHER; note = 2'-fluorouridine-3'-phosphate
  modified_base 15: mod_base = OTHER; note = 2'-O-methylguanosine-3'-phosphate
  modified_base 16: mod_base = OTHER; note = 2'-fluorouridine-3'-phosphate
  modified_base 17: mod_base = OTHER; note = 2'-O-methylcytidine-3'-phosphate
  modified_base 18: mod_base = OTHER; note = 2'-fluorouridine-3'-phosphate
  modified_base 19: mod_base = OTHER; note = 2'-O-methylguanosine-3'-phosphate
  modified_base 20: mod_base = OTHER; note = 2'-fluorocytidine-3'-phosphate
  modified_base 21: mod_base = OTHER; note = 2'-O-methyluridine-3'-phosphorothioate
  modified_base 22: mod_base = OTHER; note = 2'-fluorouridine-3'-phosphorothioate
  modified_base 23: mod_base = OTHER; note = 2'-O-methylguanosine-3'-phosphate
tccaaaagataaatgtctgcttg

SEQ ID NO: 193 - RNA, 21 nt, synthetic construct
  source 1..21: mol_type = other RNA; note = Description of Artificial Sequence: Synthetic oligonucleotide
  modified_base 1: mod_base = OTHER; note = 2'-fluoroguanosine-3'-phosphate
  modified_base 2: mod_base = OTHER; note = 2'-O-methylcytidine-3'-phosphate
  modified_base 3: mod_base = OTHER; note = 2'-fluoroadenosine-3'-phosphate
  modified_base 4: mod_base = OTHER; note = 2'-O-methylguanosine-3'-phosphate
  modified_base 5: mod_base = OTHER; note = 2'-fluoroadenosine-3'-phosphate
  modified_base 6: mod_base = OTHER; note = 2'-O-methylcytidine-3'-phosphate
  modified_base 7: mod_base = OTHER; note = 2'-fluoroadenosine-3'-phosphate
  modified_base 8: mod_base = OTHER; note = 2'-O-methyluridine-3'-phosphate
  modified_base 9: mod_base = OTHER; note = 2'-fluorouridine-3'-phosphate
  modified_base 10: mod_base = OTHER; note = 2'-fluorouridine-3'-phosphate
  modified_base 11: mod_base = OTHER; note = 2'-fluoroadenosine-3'-phosphate
  modified_base 12: mod_base = OTHER; note = 2'-O-methyluridine-3'-phosphate
  modified_base 13: mod_base = OTHER; note = 2'-fluorocytidine-3'-phosphate
  modified_base 14: mod_base = OTHER; note = 2'-O-methyluridine-3'-phosphate
  modified_base 15: mod_base = OTHER; note = 2'-fluorouridine-3'-phosphate
  modified_base 16: mod_base = OTHER; note = 2'-O-methyluridine-3'-phosphate
  modified_base 17: mod_base = OTHER; note = 2'-fluorouridine-3'-phosphate
  modified_base 18: mod_base = OTHER; note = 2'-O-methylguanosine-3'-phosphate
  modified_base 19: mod_base = OTHER; note = 2'-fluoroguanosine-3'-phosphate
  modified_base 20: mod_base = OTHER; note = 2'-O-methylguanosine-3'-phosphate
  modified_base 21: mod_base = OTHER; note = 2'-fluorouridine-3'-phosphate N-[tris(GalNAc-alkyl)-amidodecanoyl)]-4-hydroxyprolinol Hyp-(GalNAc-alkyl)3
gcagacatttatcttttgggt

SEQ ID NO: 194 - RNA, 23 nt, synthetic construct
  source 1..23: mol_type = other RNA; note = Description of Artificial Sequence: Synthetic oligonucleotide
  modified_base 1: mod_base = OTHER; note = 2'-O-methyladenosine-3'-phosphate
  modified_base 2: mod_base = OTHER; note = 2'-fluorocytidine-3'-phosphate
  modified_base 3: mod_base = OTHER; note = 2'-O-methylcytidine-3'-phosphate
  modified_base 4: mod_base = OTHER; note = 2'-fluorocytidine-3'-phosphate
  modified_base 5: mod_base = OTHER; note = 2'-O-methyladenosine-3'-phosphate
  modified_base 6: mod_base = OTHER; note = 2'-fluoroadenosine-3'-phosphate
  modified_base 7: mod_base = OTHER; note = 2'-O-methyladenosine-3'-phosphate
  modified_base 8: mod_base = OTHER; note = 2'-fluoroadenosine-3'-phosphate
  modified_base 9: mod_base = OTHER; note = 2'-O-methylguanosine-3'-phosphate
  modified_base 10: mod_base = OTHER; note = 2'-fluoroadenosine-3'-phosphate
  modified_base 11: mod_base = OTHER; note = 2'-O-methyluridine-3'-phosphate
  modified_base 12: mod_base = OTHER; note = 2'-O-methyladenosine-3'-phosphate
  modified_base 13: mod_base = OTHER; note = 2'-O-methyladenosine-3'-phosphate
  modified_base 14: mod_base = OTHER; note = 2'-fluoroadenosine-3'-phosphate
  modified_base 15: mod_base = OTHER; note = 2'-O-methyluridine-3'-phosphate
  modified_base 16: mod_base = OTHER; note = 2'-fluoroguanosine-3'-phosphate
  modified_base 17: mod_base = OTHER; note = 2'-O-methyluridine-3'-phosphate
  modified_base 18: mod_base = OTHER; note = 2'-fluorocytidine-3'-phosphate
  modified_base 19: mod_base = OTHER; note = 2'-O-methyluridine-3'-phosphate
  modified_base 20: mod_base = OTHER; note = 2'-fluoroguanosine-3'-phosphate
  modified_base 21: mod_base = OTHER; note = 2'-O-methylcytidine-3'-phosphorothioate
  modified_base 22: mod_base = OTHER; note = 2'-fluorouridine-3'-phosphorothioate
  modified_base 23: mod_base = OTHER; note = 2'-O-methyluridine-3'-phosphate
acccaaaagataaatgtctgctt

SEQ ID NO: 195 - RNA, 21 nt, synthetic construct
  source 1..21: mol_type = other RNA; note = Description of Artificial Sequence: Synthetic oligonucleotide
  modified_base 1: mod_base = OTHER; note = 2'-fluoroadenosine-3'-phosphate
  modified_base 2: mod_base = OTHER; note = 2'-O-methylguanosine-3'-phosphate
  modified_base 3: mod_base = OTHER; note = 2'-fluoroadenosine-3'-phosphate
  modified_base 4: mod_base = OTHER; note = 2'-O-methylcytidine-3'-phosphate
  modified_base 5: mod_base = OTHER; note = 2'-fluoroadenosine-3'-phosphate
  modified_base 6: mod_base = OTHER; note = 2'-O-methyluridine-3'-phosphate
  modified_base 7: mod_base = OTHER; note = 2'-fluorouridine-3'-phosphate
  modified_base 8: mod_base = OTHER; note = 2'-O-methyluridine-3'-phosphate
  modified_base 9: mod_base = OTHER; note = 2'-fluoroadenosine-3'-phosphate
  modified_base 10: mod_base = OTHER; note = 2'-fluorouridine-3'-phosphate
  modified_base 11: mod_base = OTHER; note = 2'-fluorocytidine-3'-phosphate
  modified_base 12: mod_base = OTHER; note = 2'-O-methyluridine-3'-phosphate
  modified_base 13: mod_base = OTHER; note = 2'-fluorouridine-3'-phosphate
  modified_base 14: mod_base = OTHER; note = 2'-O-methyluridine-3'-phosphate
  modified_base 15: mod_base = OTHER; note = 2'-fluorouridine-3'-phosphate
  modified_base 16: mod_base = OTHER; note = 2'-O-methylguanosine-3'-phosphate
  modified_base 17: mod_base = OTHER; note = 2'-fluoroguanosine-3'-phosphate
  modified_base 18: mod_base = OTHER; note = 2'-O-methylguanosine-3'-phosphate
  modified_base 19: mod_base = OTHER; note = 2'-fluorouridine-3'-phosphate
  modified_base 20: mod_base = OTHER; note = 2'-O-methylcytidine-3'-phosphate
  modified_base 21: mod_base = OTHER; note = 2'-fluorouridine-3'-phosphate N-[tris(GalNAc-alkyl)-amidodecanoyl)]-4-hydroxyprolinol Hyp-(GalNAc-alkyl)3
agacatttatcttttgggtct

SEQ ID NO: 196 - RNA, 23 nt, synthetic construct
  source 1..23: mol_type = other RNA; note = Description of Artificial Sequence: Synthetic oligonucleotide
  modified_base 1: mod_base = OTHER; note = 2'-O-methyladenosine-3'-phosphate
  modified_base 2: mod_base = OTHER; note = 2'-fluoroguanosine-3'-phosphate
  modified_base 3: mod_base = OTHER; note = 2'-O-methyladenosine-3'-phosphate
  modified_base 4: mod_base = OTHER; note = 2'-fluorocytidine-3'-phosphate
  modified_base 5: mod_base = OTHER; note = 2'-O-methylcytidine-3'-phosphate
  modified_base 6: mod_base = OTHER; note = 2'-fluorocytidine-3'-phosphate
  modified_base 7: mod_base = OTHER; note = 2'-O-methyladenosine-3'-phosphate
  modified_base 8: mod_base = OTHER; note = 2'-fluoroadenosine-3'-phosphate
  modified_base 9: mod_base = OTHER; note = 2'-O-methyladenosine-3'-phosphate
  modified_base 10: mod_base = OTHER; note = 2'-fluoroadenosine-3'-phosphate
  modified_base 11: mod_base = OTHER; note = 2'-O-methylguanosine-3'-phosphate
  modified_base 12: mod_base = OTHER; note = 2'-O-methyladenosine-3'-phosphate
  modified_base 13: mod_base = OTHER; note = 2'-O-methyluridine-3'-phosphate
  modified_base 14: mod_base = OTHER; note = 2'-fluoroadenosine-3'-phosphate
  modified_base 15: mod_base = OTHER; note = 2'-O-methyladenosine-3'-phosphate
  modified_base 16: mod_base = OTHER; note = 2'-fluoroadenosine-3'-phosphate
  modified_base 17: mod_base = OTHER; note = 2'-O-methyluridine-3'-phosphate
  modified_base 18: mod_base = OTHER; note = 2'-fluoroguanosine-3'-phosphate
  modified_base 19: mod_base = OTHER; note = 2'-O-methyluridine-3'-phosphate
  modified_base 20: mod_base = OTHER; note = 2'-fluorocytidine-3'-phosphate
  modified_base 21: mod_base = OTHER; note = 2'-O-methyluridine-3'-phosphorothioate
  modified_base 22: mod_base = OTHER; note = 2'-fluoroguanosine-3'-phosphorothioate
  modified_base 23: mod_base = OTHER; note = 2'-O-methylcytidine-3'-phosphate
agacccaaaagataaatgtctgc

SEQ ID NO: 197 - RNA, 21 nt, synthetic construct
  source 1..21: mol_type = other RNA; note = Description of Artificial Sequence: Synthetic oligonucleotide
  modified_base 1: mod_base = OTHER; note = 2'-fluoroguanosine-3'-phosphate
  modified_base 2: mod_base = OTHER; note = 2'-O-methyladenosine-3'-phosphate
  modified_base 3: mod_base = OTHER; note = 2'-fluorocytidine-3'-phosphate
  modified_base 4: mod_base = OTHER; note = 2'-O-methyladenosine-3'-phosphate
  modified_base 5: mod_base = OTHER; note = 2'-fluorouridine-3'-phosphate
  modified_base 6: mod_base = OTHER; note = 2'-O-methyluridine-3'-phosphate
  modified_base 7: mod_base = OTHER; note = 2'-fluorouridine-3'-phosphate
  modified_base 8: mod_base = OTHER; note = 2'-O-methyladenosine-3'-phosphate
  modified_base 9: mod_base = OTHER; note = 2'-fluorouridine-3'-phosphate
  modified_base 10: mod_base = OTHER; note = 2'-fluorocytidine-3'-phosphate
  modified_base 11: mod_base = OTHER; note = 2'-fluorouridine-3'-phosphate
  modified_base 12: mod_base = OTHER; note = 2'-O-methyluridine-3'-phosphate
  modified_base 13: mod_base = OTHER; note = 2'-fluorouridine-3'-phosphate
  modified_base 14: mod_base = OTHER; note = 2'-O-methyluridine-3'-phosphate
  modified_base 15: mod_base = OTHER; note = 2'-fluoroguanosine-3'-phosphate
  modified_base 16: mod_base = OTHER; note = 2'-O-methylguanosine-3'-phosphate
  modified_base 17: mod_base = OTHER; note = 2'-fluoroguanosine-3'-phosphate
  modified_base 18: mod_base = OTHER; note = 2'-O-methyluridine-3'-phosphate
  modified_base 19: mod_base = OTHER; note = 2'-fluorocytidine-3'-phosphate
  modified_base 20: mod_base = OTHER; note = 2'-O-methyluridine-3'-phosphate
  modified_base 21: mod_base = OTHER; note = 2'-fluorouridine-3'-phosphate N-[tris(GalNAc-alkyl)-amidodecanoyl)]-4-hydroxyprolinol Hyp-(GalNAc-alkyl)3
gacatttatcttttgggtctt

SEQ ID NO: 198 - RNA, 23 nt, synthetic construct
  source 1..23: mol_type = other RNA; note = Description of Artificial Sequence: Synthetic oligonucleotide
  modified_base 1: mod_base = OTHER; note = 2'-O-methyladenosine-3'-phosphate
  modified_base 2: mod_base = OTHER; note = 2'-fluoroadenosine-3'-phosphate
  modified_base 3: mod_base = OTHER; note = 2'-O-methylguanosine-3'-phosphate
  modified_base 4: mod_base = OTHER; note = 2'-fluoroadenosine-3'-phosphate
  modified_base 5: mod_base = OTHER; note = 2'-O-methylcytidine-3'-phosphate
  modified_base 6: mod_base = OTHER; note = 2'-fluorocytidine-3'-phosphate
  modified_base 7: mod_base = OTHER; note = 2'-O-methylcytidine-3'-phosphate
  modified_base 8: mod_base = OTHER; note = 2'-fluoroadenosine-3'-phosphate
  modified_base 9: mod_base = OTHER; note = 2'-O-methyladenosine-3'-phosphate
  modified_base 10: mod_base = OTHER; note = 2'-fluoroadenosine-3'-phosphate
  modified_base 11: mod_base = OTHER; note = 2'-O-methyladenosine-3'-phosphate
  modified_base 12: mod_base = OTHER; note = 2'-O-methylguanosine-3'-phosphate
  modified_base 13: mod_base = OTHER; note = 2'-O-methyladenosine-3'-phosphate
  modified_base 14: mod_base = OTHER; note = 2'-fluorouridine-3'-phosphate
  modified_base 15: mod_base = OTHER; note = 2'-O-methyladenosine-3'-phosphate
  modified_base 16: mod_base = OTHER; note = 2'-fluoroadenosine-3'-phosphate
  modified_base 17: mod_base = OTHER; note = 2'-O-methyladenosine-3'-phosphate
  modified_base 18: mod_base = OTHER; note = 2'-fluorouridine-3'-phosphate
  modified_base 19: mod_base = OTHER; note = 2'-O-methylguanosine-3'-phosphate
  modified_base 20: mod_base = OTHER; note = 2'-fluorouridine-3'-phosphate
  modified_base 21: mod_base = OTHER; note = 2'-O-methylcytidine-3'-phosphorothioate
  modified_base 22: mod_base = OTHER; note = 2'-fluorouridine-3'-phosphorothioate
  modified_base 23: mod_base = OTHER; note = 2'-O-methylguanosine-3'-phosphate
aagacccaaaagataaatgtctg

SEQ ID NO: 199 - RNA, 21 nt, synthetic construct
  source 1..21: mol_type = other RNA; note = Description of Artificial Sequence: Synthetic oligonucleotide
  modified_base 1: mod_base = OTHER; note = 2'-fluoroadenosine-3'-phosphate
  modified_base 2: mod_base = OTHER; note = 2'-O-methylcytidine-3'-phosphate
  modified_base 3: mod_base = OTHER; note = 2'-fluoroadenosine-3'-phosphate
  modified_base 4: mod_base = OTHER; note = 2'-O-methyluridine-3'-phosphate
  modified_base 5: mod_base = OTHER; note = 2'-fluorouridine-3'-phosphate
  modified_base 6: mod_base = OTHER; note = 2'-O-methyluridine-3'-phosphate
  modified_base 7: mod_base = OTHER; note = 2'-fluoroadenosine-3'-phosphate
  modified_base 8: mod_base = OTHER; note = 2'-O-methyluridine-3'-phosphate
  modified_base 9: mod_base = OTHER; note = 2'-fluorocytidine-3'-phosphate
  modified_base 10: mod_base = OTHER; note = 2'-fluorouridine-3'-phosphate
  modified_base 11: mod_base = OTHER; note = 2'-fluorouridine-3'-phosphate
  modified_base 12: mod_base = OTHER; note = 2'-O-methyluridine-3'-phosphate
  modified_base 13: mod_base = OTHER; note = 2'-fluorouridine-3'-phosphate
  modified_base 14: mod_base = OTHER; note = 2'-O-methylguanosine-3'-phosphate
  modified_base 15: mod_base = OTHER; note = 2'-fluoroguanosine-3'-phosphate
  modified_base 16: mod_base = OTHER; note = 2'-O-methylguanosine-3'-phosphate
  modified_base 17: mod_base = OTHER; note = 2'-fluorouridine-3'-phosphate
  modified_base 18: mod_base = OTHER; note = 2'-O-methylcytidine-3'-phosphate
  modified_base 19: mod_base = OTHER; note = 2'-fluorouridine-3'-phosphate
  modified_base 20: mod_base = OTHER; note = 2'-O-methylguanosine-3'-phosphate
  modified_base 21: mod_base = OTHER; note = 2'-fluorouridine-3'-phosphate N-[tris(GalNAc-alkyl)-amidodecanoyl)]-4-hydroxyprolinol Hyp-(GalNAc-alkyl)3
acatttatcttttgggtctgt

SEQ ID NO: 200 - RNA, 23 nt, synthetic construct
  source 1..23: mol_type = other RNA; note = Description of Artificial Sequence: Synthetic oligonucleotide
  modified_base 1: mod_base = OTHER; note = 2'-O-methyladenosine-3'-phosphate
  modified_base 2: mod_base = OTHER; note = 2'-fluorocytidine-3'-phosphate
  modified_base 3: mod_base = OTHER; note = 2'-O-methyladenosine-3'-phosphate
  modified_base 4: mod_base = OTHER; note = 2'-fluoroguanosine-3'-phosphate
  modified_base 5: mod_base = OTHER; note = 2'-O-methyladenosine-3'-phosphate
  modified_base 6: mod_base = OTHER; note = 2'-fluorocytidine-3'-phosphate
  modified_base 7: mod_base = OTHER; note = 2'-O-methylcytidine-3'-phosphate
  modified_base 8: mod_base = OTHER; note = 2'-fluorocytidine-3'-phosphate
  modified_base 9: mod_base = OTHER; note = 2'-O-methyladenosine-3'-phosphate
  modified_base 10: mod_base = OTHER; note = 2'-fluoroadenosine-3'-phosphate
  modified_base 11: mod_base = OTHER; note = 2'-O-methyladenosine-3'-phosphate
  modified_base 12: mod_base = OTHER; note = 2'-O-methyladenosine-3'-phosphate
  modified_base 13: mod_base = OTHER; note = 2'-O-methylguanosine-3'-phosphate
  modified_base 14: mod_base = OTHER; note = 2'-fluoroadenosine-3'-phosphate
  modified_base 15: mod_base = OTHER; note = 2'-O-methyluridine-3'-phosphate
  modified_base 16: mod_base = OTHER; note = 2'-fluoroadenosine-3'-phosphate
  modified_base 17: mod_base = OTHER; note = 2'-O-methyladenosine-3'-phosphate
  modified_base 18: mod_base = OTHER; note = 2'-fluoroadenosine-3'-phosphate
  modified_base 19: mod_base = OTHER; note = 2'-O-methyluridine-3'-phosphate
  modified_base 20: mod_base = OTHER; note = 2'-fluoroguanosine-3'-phosphate
  modified_base 21: mod_base = OTHER; note = 2'-O-methyluridine-3'-phosphorothioate
  modified_base 22: mod_base = OTHER; note = 2'-fluorocytidine-3'-phosphorothioate
  modified_base 23: mod_base = OTHER; note = 2'-O-methyluridine-3'-phosphate
acagacccaaaagataaatgtct

SEQ ID NO: 201 - RNA, 21 nt, synthetic construct
  source 1..21: mol_type = other RNA; note = Description of Artificial Sequence: Synthetic oligonucleotide
  modified_base 1: mod_base = OTHER; note = 2'-fluorouridine-3'-phosphate
  modified_base 2: mod_base = OTHER; note = 2'-O-methyluridine-3'-phosphate
  modified_base 3: mod_base = OTHER; note = 2'-fluorouridine-3'-phosphate
  modified_base 4: mod_base = OTHER; note = 2'-O-methyladenosine-3'-phosphate
  modified_base 5: mod_base = OTHER; note = 2'-fluorouridine-3'-phosphate
  modified_base 6: mod_base = OTHER; note = 2'-O-methylcytidine-3'-phosphate
  modified_base 7: mod_base = OTHER; note = 2'-fluorouridine-3'-phosphate
  modified_base 8: mod_base = OTHER; note = 2'-O-methyluridine-3'-phosphate
  modified_base 9: mod_base = OTHER; note = 2'-fluorouridine-3'-phosphate
  modified_base 10: mod_base = OTHER; note = 2'-fluorouridine-3'-phosphate
  modified_base 11: mod_base = OTHER; note = 2'-fluoroguanosine-3'-phosphate
  modified_base 12: mod_base = OTHER; note = 2'-O-methylguanosine-3'-phosphate
  modified_base 13: mod_base = OTHER; note = 2'-fluoroguanosine-3'-phosphate
  modified_base 14: mod_base = OTHER; note = 2'-O-methyluridine-3'-phosphate
  modified_base 15: mod_base = OTHER; note = 2'-fluorocytidine-3'-phosphate
  modified_base 16: mod_base = OTHER; note = 2'-O-methyluridine-3'-phosphate
  modified_base 17: mod_base = OTHER; note = 2'-fluoroguanosine-3'-phosphate
  modified_base 18: mod_base = OTHER; note = 2'-O-methyluridine-3'-phosphate
  modified_base 19: mod_base = OTHER; note = 2'-fluorocytidine-3'-phosphate
  modified_base 20: mod_base = OTHER; note = 2'-O-methylcytidine-3'-phosphate
  modified_base 21: mod_base = OTHER; note = 2'-fluorouridine-3'-phosphate N-[tris(GalNAc-alkyl)-amidodecanoyl)]-4-hydroxyprolinol Hyp-(GalNAc-alkyl)3
tttatcttttgggtctgtcct

SEQ ID NO: 202 - RNA, 23 nt, synthetic construct
  source 1..23: mol_type = other RNA; note = Description of Artificial Sequence: Synthetic oligonucleotide
  modified_base 1: mod_base = OTHER; note = 2'-O-methyladenosine-3'-phosphate
  modified_base 2: mod_base = OTHER; note = 2'-fluoroguanosine-3'-phosphate
  modified_base 3: mod_base = OTHER; note = 2'-O-methylguanosine-3'-phosphate
  modified_base 4: mod_base = OTHER; note = 2'-fluoroadenosine-3'-phosphate
  modified_base 5: mod_base = OTHER; note = 2'-O-methylcytidine-3'-phosphate
  modified_base 6: mod_base = OTHER; note = 2'-fluoroadenosine-3'-phosphate
  modified_base 7: mod_base = OTHER; note = 2'-O-methylguanosine-3'-phosphate
  modified_base 8: mod_base = OTHER; note = 2'-fluoroadenosine-3'-phosphate
  modified_base 9: mod_base = OTHER; note = 2'-O-methylcytidine-3'-phosphate
  modified_base 10: mod_base = OTHER; note = 2'-fluorocytidine-3'-phosphate
  modified_base 11: mod_base = OTHER; note = 2'-O-methylcytidine-3'-phosphate
  modified_base 12: mod_base = OTHER; note = 2'-O-methyladenosine-3'-phosphate
  modified_base 13: mod_base = OTHER; note = 2'-O-methyladenosine-3'-phosphate
  modified_base 14: mod_base = OTHER; note = 2'-fluoroadenosine-3'-phosphate
  modified_base 15: mod_base = OTHER; note = 2'-O-methyladenosine-3'-phosphate
  modified_base 16: mod_base = OTHER; note = 2'-fluoroguanosine-3'-phosphate
  modified_base 17: mod_base = OTHER; note = 2'-O-methyladenosine-3'-phosphate
  modified_base 18: mod_base = OTHER; note = 2'-fluorouridine-3'-phosphate
  modified_base 19: mod_base = OTHER; note = 2'-O-methyladenosine-3'-phosphate
  modified_base 20: mod_base = OTHER; note = 2'-fluoroadenosine-3'-phosphate
  modified_base 21: mod_base = OTHER; note = 2'-O-methyladenosine-3'-phosphorothioate
  modified_base 22: mod_base = OTHER; note = 2'-fluorouridine-3'-phosphorothioate
  modified_base 23: mod_base = OTHER; note = 2'-O-methylguanosine-3'-phosphate
aggacagacccaaaagataaatg

SEQ ID NO: 203 - RNA, 21 nt, synthetic construct
  source 1..21: mol_type = other RNA; note = Description of Artificial Sequence: Synthetic oligonucleotide
  modified_base 1: mod_base = OTHER; note = 2'-fluorouridine-3'-phosphate
  modified_base 2: mod_base = OTHER; note = 2'-O-methyluridine-3'-phosphate
  modified_base 3: mod_base = OTHER; note = 2'-fluoroadenosine-3'-phosphate
  modified_base 4: mod_base = OTHER; note = 2'-O-methyluridine-3'-phosphate
  modified_base 5: mod_base = OTHER; note = 2'-fluorocytidine-3'-phosphate
  modified_base 6: mod_base = OTHER; note = 2'-O-methyluridine-3'-phosphate
  modified_base 7: mod_base = OTHER; note = 2'-fluorouridine-3'-phosphate
  modified_base 8: mod_base = OTHER; note = 2'-O-methyluridine-3'-phosphate
  modified_base 9: mod_base = OTHER; note = 2'-fluorouridine-3'-phosphate
  modified_base 10: mod_base = OTHER; note = 2'-fluoroguanosine-3'-phosphate
  modified_base 11: mod_base = OTHER; note = 2'-fluoroguanosine-3'-phosphate
  modified_base 12: mod_base = OTHER; note = 2'-O-methylguanosine-3'-phosphate
  modified_base 13: mod_base = OTHER; note = 2'-fluorouridine-3'-phosphate
  modified_base 14: mod_base = OTHER; note = 2'-O-methylcytidine-3'-phosphate
  modified_base 15: mod_base = OTHER; note = 2'-fluorouridine-3'-phosphate
  modified_base 16: mod_base = OTHER; note = 2'-O-methylguanosine-3'-phosphate
  modified_base 17: mod_base = OTHER; note = 2'-fluorouridine-3'-phosphate
  modified_base 18: mod_base = OTHER; note = 2'-O-methylcytidine-3'-phosphate
  modified_base 19: mod_base = OTHER; note = 2'-fluorocytidine-3'-phosphate
  modified_base 20: mod_base = OTHER; note = 2'-O-methyluridine-3'-phosphate
  modified_base 21: mod_base = OTHER; note = 2'-fluorouridine-3'-phosphate N-[tris(GalNAc-alkyl)-amidodecanoyl)]-4-hydroxyprolinol Hyp-(GalNAc-alkyl)3
ttatcttttgggtctgtcctt

SEQ ID NO: 204 - RNA, 23 nt, synthetic construct
  source 1..23: mol_type = other RNA; note = Description of Artificial Sequence: Synthetic oligonucleotide
  modified_base 1: mod_base = OTHER; note = 2'-O-methyladenosine-3'-phosphate
  modified_base 2: mod_base = OTHER; note = 2'-fluoroadenosine-3'-phosphate
  modified_base 3: mod_base = OTHER; note = 2'-O-methylguanosine-3'-phosphate
  modified_base 4: mod_base = OTHER; note = 2'-fluoroguanosine-3'-phosphate
  modified_base 5: mod_base = OTHER; note = 2'-O-methyladenosine-3'-phosphate
  modified_base 6: mod_base = OTHER; note = 2'-fluorocytidine-3'-phosphate
  modified_base 7: mod_base = OTHER; note = 2'-O-methyladenosine-3'-phosphate
  modified_base 8: mod_base = OTHER; note = 2'-fluoroguanosine-3'-phosphate
  modified_base 9: mod_base = OTHER; note = 2'-O-methyladenosine-3'-phosphate
  modified_base 10: mod_base = OTHER; note = 2'-fluorocytidine-3'-phosphate
  modified_base 11: mod_base = OTHER; note = 2'-O-methylcytidine-3'-phosphate
  modified_base 12: mod_base = OTHER; note = 2'-O-methylcytidine-3'-phosphate
  modified_base 13: mod_base = OTHER; note = 2'-O-methyladenosine-3'-phosphate
  modified_base 14: mod_base = OTHER; note = 2'-fluoroadenosine-3'-phosphate
  modified_base 15: mod_base = OTHER; note = 2'-O-methyladenosine-3'-phosphate
  modified_base 16: mod_base = OTHER; note = 2'-fluoroadenosine-3'-phosphate
  modified_base 17: mod_base = OTHER; note = 2'-O-methylguanosine-3'-phosphate
  modified_base 18: mod_base = OTHER; note = 2'-fluoroadenosine-3'-phosphate
  modified_base 19: mod_base = OTHER; note = 2'-O-methyluridine-3'-phosphate
  modified_base 20: mod_base = OTHER; note = 2'-fluoroadenosine-3'-phosphate
  modified_base 21: mod_base = OTHER; note = 2'-O-methyladenosine-3'-phosphorothioate
  modified_base 22: mod_base = OTHER; note = 2'-fluoroadenosine-3'-phosphorothioate
  modified_base 23: mod_base = OTHER; note = 2'-O-methyluridine-3'-phosphate
aaggacagacccaaaagataaat

SEQ ID NO: 205 - RNA, 21 nt, synthetic construct
  source 1..21: mol_type = other RNA; note = Description of Artificial Sequence: Synthetic oligonucleotide
  modified_base 1: mod_base = OTHER; note = 2'-fluorouridine-3'-phosphate
  modified_base 2: mod_base = OTHER; note = 2'-O-methyladenosine-3'-phosphate
  modified_base 3: mod_base = OTHER; note = 2'-fluorouridine-3'-phosphate
  modified_base 4: mod_base = OTHER; note = 2'-O-methylcytidine-3'-phosphate
  modified_base 5: mod_base = OTHER; note = 2'-fluorouridine-3'-phosphate
  modified_base 6: mod_base = OTHER; note = 2'-O-methyluridine-3'-phosphate
  modified_base 7: mod_base = OTHER; note = 2'-fluorouridine-3'-phosphate
  modified_base 8: mod_base = OTHER; note = 2'-O-methyluridine-3'-phosphate
  modified_base 9: mod_base = OTHER; note = 2'-fluoroguanosine-3'-phosphate
  modified_base 10: mod_base = OTHER; note = 2'-fluoroguanosine-3'-phosphate
  modified_base 11: mod_base = OTHER; note = 2'-fluoroguanosine-3'-phosphate
  modified_base 12: mod_base = OTHER; note = 2'-O-methyluridine-3'-phosphate
  modified_base 13: mod_base = OTHER; note = 2'-fluorocytidine-3'-phosphate
  modified_base 14: mod_base = OTHER; note = 2'-O-methyluridine-3'-phosphate
  modified_base 15: mod_base = OTHER; note = 2'-fluoroguanosine-3'-phosphate
  modified_base 16: mod_base = OTHER; note = 2'-O-methyluridine-3'-phosphate
  modified_base 17: mod_base = OTHER; note = 2'-fluorocytidine-3'-phosphate
  modified_base 18: mod_base = OTHER; note = 2'-O-methylcytidine-3'-phosphate
  modified_base 19: mod_base = OTHER; note = 2'-fluorouridine-3'-phosphate
  modified_base 20: mod_base = OTHER; note = 2'-O-methylcytidine-3'-phosphate
  modified_base 21: mod_base = OTHER; note = 2'-fluorouridine-3'-phosphate N-[tris(GalNAc-alkyl)-amidodecanoyl)]-4-hydroxyprolinol Hyp-(GalNAc-alkyl)3
tatcttttgggtctgtcctct

SEQ ID NO: 206 - RNA, 23 nt, synthetic construct
  source 1..23: mol_type = other RNA; note = Description of Artificial Sequence: Synthetic oligonucleotide
  modified_base 1: mod_base = OTHER; note = 2'-O-methyladenosine-3'-phosphate
  modified_base 2: mod_base = OTHER; note = 2'-fluoroguanosine-3'-phosphate
  modified_base 3: mod_base = OTHER; note = 2'-O-methyladenosine-3'-phosphate
  modified_base 4: mod_base = OTHER; note = 2'-fluoroguanosine-3'-phosphate
  modified_base 5: mod_base = OTHER; note = 2'-O-methylguanosine-3'-phosphate
  modified_base 6: mod_base = OTHER; note = 2'-fluoroadenosine-3'-phosphate
  modified_base 7: mod_base = OTHER; note = 2'-O-methylcytidine-3'-phosphate
  modified_base 8: mod_base = OTHER; note = 2'-fluoroadenosine-3'-phosphate
  modified_base 9: mod_base = OTHER; note = 2'-O-methylguanosine-3'-phosphate
  modified_base 10: mod_base = OTHER; note = 2'-fluoroadenosine-3'-phosphate
  modified_base 11: mod_base = OTHER; note = 2'-O-methylcytidine-3'-phosphate
  modified_base 12: mod_base = OTHER; note = 2'-O-methylcytidine-3'-phosphate
  modified_base 13: mod_base = OTHER; note = 2'-O-methylcytidine-3'-phosphate
  modified_base 14: mod_base = OTHER; note = 2'-fluoroadenosine-3'-phosphate
  modified_base 15: mod_base = OTHER; note = 2'-O-methyladenosine-3'-phosphate
  modified_base 16: mod_base = OTHER; note = 2'-fluoroadenosine-3'-phosphate
  modified_base 17: mod_base = OTHER; note = 2'-O-methyladenosine-3'-phosphate
  modified_base 18: mod_base = OTHER; note = 2'-fluoroguanosine-3'-phosphate
  modified_base 19: mod_base = OTHER; note = 2'-O-methyladenosine-3'-phosphate
  modified_base 20: mod_base = OTHER; note = 2'-fluorouridine-3'-phosphate
  modified_base 21: mod_base = OTHER; note = 2'-O-methyladenosine-3'-phosphorothioate
  modified_base 22: mod_base = OTHER; note = 2'-fluoroadenosine-3'-phosphorothioate
  modified_base 23: mod_base = OTHER; note = 2'-O-methyladenosine-3'-phosphate
agaggacagacccaaaagataaa

SEQ ID NO: 207 - RNA, 21 nt, synthetic construct
  source 1..21: mol_type = other RNA; note = Description of Artificial Sequence: Synthetic oligonucleotide
  modified_base 1: mod_base = OTHER; note = 2'-fluoroadenosine-3'-phosphate
  modified_base 2: mod_base = OTHER; note = 2'-O-methyluridine-3'-phosphate
  modified_base 3: mod_base = OTHER; note = 2'-fluorocytidine-3'-phosphate
  modified_base 4: mod_base = OTHER; note = 2'-O-methyluridine-3'-phosphate
  modified_base 5: mod_base = OTHER; note = 2'-fluorouridine-3'-phosphate
  modified_base 6: mod_base = OTHER; note = 2'-O-methyluridine-3'-phosphate
  modified_base 7: mod_base = OTHER; note = 2'-fluorouridine-3'-phosphate
  modified_base 8: mod_base = OTHER; note = 2'-O-methylguanosine-3'-phosphate
  modified_base 9: mod_base = OTHER; note = 2'-fluoroguanosine-3'-phosphate
  modified_base 10: mod_base = OTHER; note = 2'-fluoroguanosine-3'-phosphate
  modified_base 11: mod_base = OTHER; note = 2'-fluorouridine-3'-phosphate
  modified_base 12: mod_base = OTHER; note = 2'-O-methylcytidine-3'-phosphate
  modified_base 13: mod_base = OTHER; note = 2'-fluorouridine-3'-phosphate
  modified_base 14: mod_base = OTHER; note = 2'-O-methylguanosine-3'-phosphate
  modified_base 15: mod_base = OTHER; note = 2'-fluorouridine-3'-phosphate
  modified_base 16: mod_base = OTHER; note = 2'-O-methylcytidine-3'-phosphate
  modified_base 17: mod_base = OTHER; note = 2'-fluorocytidine-3'-phosphate
  modified_base 18: mod_base = OTHER; note = 2'-O-methyluridine-3'-phosphate
  modified_base 19: mod_base = OTHER; note = 2'-fluorocytidine-3'-phosphate
  modified_base 20: mod_base = OTHER; note = 2'-O-methyluridine-3'-phosphate
  modified_base 21: mod_base = OTHER; note = 2'-fluorouridine-3'-phosphate N-[tris(GalNAc-alkyl)-amidodecanoyl)]-4-hydroxyprolinol Hyp-(GalNAc-alkyl)3
atcttttgggtctgtcctctt

SEQ ID NO: 208 - RNA, 23 nt, synthetic construct
  source 1..23: mol_type = other RNA; note = Description of Artificial Sequence: Synthetic oligonucleotide
  modified_base 1: mod_base = OTHER; note = 2'-O-methyladenosine-3'-phosphate
  modified_base 2: mod_base = OTHER; note = 2'-fluoroadenosine-3'-phosphate
  modified_base 3: mod_base = OTHER; note = 2'-O-methylguanosine-3'-phosphate
  modified_base 4: mod_base = OTHER; note = 2'-fluoroadenosine-3'-phosphate
  modified_base 5: mod_base = OTHER; note = 2'-O-methylguanosine-3'-phosphate
  modified_base 6: mod_base = OTHER; note = 2'-fluoroguanosine-3'-phosphate
  modified_base 7: mod_base = OTHER; note = 2'-O-methyladenosine-3'-phosphate
  modified_base 8: mod_base = OTHER; note = 2'-fluorocytidine-3'-phosphate
  modified_base 9: mod_base = OTHER; note = 2'-O-methyladenosine-3'-phosphate
  modified_base 10: mod_base = OTHER; note = 2'-fluoroguanosine-3'-phosphate
  modified_base 11: mod_base = OTHER; note = 2'-O-methyladenosine-3'-phosphate
  modified_base 12: mod_base = OTHER; note = 2'-O-methylcytidine-3'-phosphate
  modified_base 13: mod_base = OTHER; note = 2'-O-methylcytidine-3'-phosphate
  modified_base 14: mod_base = OTHER; note = 2'-fluorocytidine-3'-phosphate
  modified_base 15: mod_base = OTHER; note = 2'-O-methyladenosine-3'-phosphate
  modified_base 16: mod_base = OTHER; note = 2'-fluoroadenosine-3'-phosphate
  modified_base 17: mod_base = OTHER; note = 2'-O-methyladenosine-3'-phosphate
  modified_base 18: mod_base = OTHER; note = 2'-fluoroadenosine-3'-phosphate
  modified_base 19: mod_base = OTHER; note = 2'-O-methylguanosine-3'-phosphate
  modified_base 20: mod_base = OTHER; note = 2'-fluoroadenosine-3'-phosphate
  modified_base 21: mod_base = OTHER; note = 2'-O-methyluridine-3'-phosphorothioate
  modified_base 22: mod_base = OTHER; note = 2'-fluoroadenosine-3'-phosphorothioate
  modified_base 23: mod_base = OTHER; note = 2'-O-methyladenosine-3'-phosphate
aagaggacagacccaaaagataa

SEQ ID NO: 209 - RNA, 21 nt, synthetic construct
  source 1..21: mol_type = other RNA; note = Description of Artificial Sequence: Synthetic oligonucleotide
  modified_base 1: mod_base = OTHER; note = 2'-fluorouridine-3'-phosphate
  modified_base 2: mod_base = OTHER; note = 2'-O-methylcytidine-3'-phosphate
  modified_base 3: mod_base = OTHER; note = 2'-fluorouridine-3'-phosphate
  modified_base 4: mod_base = OTHER; note = 2'-O-methyluridine-3'-phosphate
  modified_base 5: mod_base = OTHER; note = 2'-fluorouridine-3'-phosphate
  modified_base 6: mod_base = OTHER; note = 2'-O-methyluridine-3'-phosphate
  modified_base 7: mod_base = OTHER; note = 2'-fluoroguanosine-3'-phosphate
  modified_base 8: mod_base = OTHER; note = 2'-O-methylguanosine-3'-phosphate
  modified_base 9: mod_base = OTHER; note = 2'-fluoroguanosine-3'-phosphate
  modified_base 10: mod_base = OTHER; note = 2'-fluorouridine-3'-phosphate
  modified_base 11: mod_base = OTHER; note = 2'-fluorocytidine-3'-phosphate
  modified_base 12: mod_base = OTHER; note = 2'-O-methyluridine-3'-phosphate
  modified_base 13: mod_base = OTHER; note = 2'-fluoroguanosine-3'-phosphate
  modified_base 14: mod_base = OTHER; note = 2'-O-methyluridine-3'-phosphate
  modified_base 15: mod_base = OTHER; note = 2'-fluorocytidine-3'-phosphate
  modified_base 16: mod_base = OTHER; note = 2'-O-methylcytidine-3'-phosphate
  modified_base 17: mod_base = OTHER; note = 2'-fluorouridine-3'-phosphate
  modified_base 18: mod_base = OTHER; note = 2'-O-methylcytidine-3'-phosphate
  modified_base 19: mod_base = OTHER; note = 2'-fluorouridine-3'-phosphate
  modified_base 20: mod_base = OTHER; note = 2'-O-methylcytidine-3'-phosphate
  modified_base 21: mod_base = OTHER; note = 2'-fluorouridine-3'-phosphate N-[tris(GalNAc-alkyl)-amidodecanoyl)]-4-hydroxyprolinol Hyp-(GalNAc-alkyl)3
tcttttgggtctgtcctctct

SEQ ID NO: 210 - RNA, 23 nt, synthetic construct
  source 1..23: mol_type = other RNA; note = Description of Artificial Sequence: Synthetic oligonucleotide
  modified_base 1: mod_base = OTHER; note = 2'-O-methyladenosine-3'-phosphate
  modified_base 2: mod_base = OTHER; note = 2'-fluoroguanosine-3'-phosphate
  modified_base 3: mod_base = OTHER; note = 2'-O-methyladenosine-3'-phosphate
  modified_base 4: mod_base = OTHER; note = 2'-fluoroguanosine-3'-phosphate
  modified_base 5: mod_base = OTHER; note = 2'-O-methyladenosine-3'-phosphate
  modified_base 6: mod_base = OTHER; note = 2'-fluoroguanosine-3'-phosphate
  modified_base 7: mod_base = OTHER; note = 2'-O-methylguanosine-3'-phosphate
  modified_base 8: mod_base = OTHER; note = 2'-fluoroadenosine-3'-phosphate
  modified_base 9: mod_base = OTHER; note = 2'-O-methylcytidine-3'-phosphate
  modified_base 10: mod_base = OTHER; note = 2'-fluoroadenosine-3'-phosphate
  modified_base 11: mod_base = OTHER; note = 2'-O-methylguanosine-3'-phosphate
  modified_base 12: mod_base = OTHER; note = 2'-O-methyladenosine-3'-phosphate
  modified_base 13: mod_base = OTHER; note = 2'-O-methylcytidine-3'-phosphate
  modified_base 14: mod_base = OTHER; note = 2'-fluorocytidine-3'-phosphate
  modified_base 15: mod_base = OTHER; note = 2'-O-methylcytidine-3'-phosphate
  modified_base 16: mod_base = OTHER; note = 2'-fluoroadenosine-3'-phosphate
  modified_base 17: mod_base = OTHER; note = 2'-O-methyladenosine-3'-phosphate
  modified_base 18: mod_base = OTHER; note = 2'-fluoroadenosine-3'-phosphate
  modified_base 19: mod_base = OTHER; note = 2'-O-methyladenosine-3'-phosphate
  modified_base 20: mod_base = OTHER; note = 2'-fluoroguanosine-3'-phosphate
  modified_base 21: mod_base = OTHER; note = 2'-O-methyladenosine-3'-phosphorothioate
  modified_base 22: mod_base = OTHER; note = 2'-fluorouridine-3'-phosphorothioate
  modified_base 23: mod_base = OTHER; note = 2'-O-methyladenosine-3'-phosphate
agagaggacagacccaaaagata

SEQ ID NO: 211 - RNA, 21 nt, synthetic construct
  source 1..21: mol_type = other RNA; note = Description of Artificial Sequence: Synthetic oligonucleotide
  modified_base 1: mod_base = OTHER; note = 2'-fluorouridine-3'-phosphate
  modified_base 2: mod_base = OTHER; note = 2'-O-methyluridine-3'-phosphate
  modified_base 3: mod_base = OTHER; note = 2'-fluorouridine-3'-phosphate
  modified_base 4: mod_base = OTHER; note = 2'-O-methyluridine-3'-phosphate
  modified_base 5: mod_base = OTHER; note = 2'-fluoroguanosine-3'-phosphate
  modified_base 6: mod_base = OTHER; note = 2'-O-methylguanosine-3'-phosphate
  modified_base 7: mod_base = OTHER; note = 2'-fluoroguanosine-3'-phosphate
  modified_base 8: mod_base = OTHER; note = 2'-O-methyluridine-3'-phosphate
  modified_base 9: mod_base = OTHER; note = 2'-fluorocytidine-3'-phosphate
  modified_base 10: mod_base = OTHER; note = 2'-fluorouridine-3'-phosphate
  modified_base 11: mod_base = OTHER; note = 2'-fluoroguanosine-3'-phosphate
  modified_base 12: mod_base = OTHER; note = 2'-O-methyluridine-3'-phosphate
  modified_base 13: mod_base = OTHER; note = 2'-fluorocytidine-3'-phosphate
  modified_base 14: mod_base = OTHER; note = 2'-O-methylcytidine-3'-phosphate
  modified_base 15: mod_base = OTHER; note = 2'-fluorouridine-3'-phosphate
  modified_base 16: mod_base = OTHER; note = 2'-O-methylcytidine-3'-phosphate
  modified_base 17: mod_base = OTHER; note = 2'-fluorouridine-3'-phosphate
  modified_base 18: mod_base = OTHER; note = 2'-O-methylcytidine-3'-phosphate
  modified_base 19: mod_base = OTHER; note = 2'-fluorouridine-3'-phosphate
  modified_base 20: mod_base = OTHER; note = 2'-O-methylguanosine-3'-phosphate
  modified_base 21: mod_base = OTHER; note = 2'-fluorouridine-3'-phosphate N-[tris(GalNAc-alkyl)-amidodecanoyl)]-4-hydroxyprolinol Hyp-(GalNAc-alkyl)3
ttttgggtctgtcctctctgt

SEQ ID NO: 212 - RNA, 23 nt, synthetic construct
  source 1..23: mol_type = other RNA; note = Description of Artificial Sequence: Synthetic oligonucleotide
  modified_base 1: mod_base = OTHER; note = 2'-O-methyladenosine-3'-phosphate
  modified_base 2: mod_base = OTHER; note = 2'-fluorocytidine-3'-phosphate
  modified_base 3: mod_base = OTHER; note = 2'-O-methyladenosine-3'-phosphate
  modified_base 4: mod_base = OTHER; note = 2'-fluoroguanosine-3'-phosphate
  modified_base 5: mod_base = OTHER; note = 2'-O-methyladenosine-3'-phosphate
  modified_base 6: mod_base = OTHER; note = 2'-fluoroguanosine-3'-phosphate
  modified_base 7: mod_base = OTHER; note = 2'-O-methyladenosine-3'-phosphate
  modified_base 8: mod_base = OTHER; note = 2'-fluoroguanosine-3'-phosphate
  modified_base 9: mod_base = OTHER; note = 2'-O-methylguanosine-3'-phosphate
  modified_base 10: mod_base = OTHER; note = 2'-fluoroadenosine-3'-phosphate
  modified_base 11: mod_base = OTHER; note = 2'-O-methylcytidine-3'-phosphate
  modified_base 12: mod_base = OTHER; note = 2'-O-methyladenosine-3'-phosphate
  modified_base 13: mod_base = OTHER; note = 2'-O-methylguanosine-3'-phosphate
  modified_base 14: mod_base = OTHER; note = 2'-fluoroadenosine-3'-phosphate
  modified_base 15: mod_base = OTHER; note = 2'-O-methylcytidine-3'-phosphate
  modified_base 16: mod_base = OTHER; note = 2'-fluorocytidine-3'-phosphate
  modified_base 17: mod_base = OTHER; note = 2'-O-methylcytidine-3'-phosphate
  modified_base 18: mod_base = OTHER; note = 2'-fluoroadenosine-3'-phosphate
  modified_base 19: mod_base = OTHER; note = 2'-O-methyladenosine-3'-phosphate
  modified_base 20: mod_base = OTHER; note = 2'-fluoroadenosine-3'-phosphate
  modified_base 21: mod_base = OTHER; note = 2'-O-methyladenosine-3'-phosphorothioate
  modified_base 22: mod_base = OTHER; note = 2'-fluoroguanosine-3'-phosphorothioate
  modified_base 23: mod_base = OTHER; note = 2'-O-methyladenosine-3'-phosphate
acagagaggacagacccaaaaga

SEQ ID NO: 213 - RNA, 21 nt, synthetic construct
  source 1..21: mol_type = other RNA; note = Description of Artificial Sequence: Synthetic oligonucleotide
  modified_base 1: mod_base = OTHER; note = 2'-fluorouridine-3'-phosphate
  modified_base 2: mod_base = OTHER; note = 2'-O-methyluridine-3'-phosphate
  modified_base 3: mod_base = OTHER; note = 2'-fluorouridine-3'-phosphate
  modified_base 4: mod_base = OTHER; note = 2'-O-methylguanosine-3'-phosphate
  modified_base 5: mod_base = OTHER; note = 2'-fluoroguanosine-3'-phosphate
  modified_base 6: mod_base = OTHER; note = 2'-O-methylguanosine-3'-phosphate
  modified_base 7: mod_base = OTHER; note = 2'-fluorouridine-3'-phosphate
  modified_base 8: mod_base = OTHER; note = 2'-O-methylcytidine-3'-phosphate
  modified_base 9: mod_base = OTHER; note = 2'-fluorouridine-3'-phosphate
  modified_base 10: mod_base = OTHER; note = 2'-fluoroguanosine-3'-phosphate
  modified_base 11: mod_base = OTHER; note = 2'-fluorouridine-3'-phosphate
  modified_base 12: mod_base = OTHER; note = 2'-O-methylcytidine-3'-phosphate
  modified_base 13: mod_base = OTHER; note = 2'-fluorocytidine-3'-phosphate
  modified_base 14: mod_base = OTHER; note = 2'-O-methyluridine-3'-phosphate
  modified_base 15: mod_base = OTHER; note = 2'-fluorocytidine-3'-phosphate
  modified_base 16: mod_base = OTHER; note = 2'-O-methyluridine-3'-phosphate
  modified_base 17: mod_base = OTHER; note = 2'-fluorocytidine-3'-phosphate
  modified_base 18: mod_base = OTHER; note = 2'-O-methyluridine-3'-phosphate
  modified_base 19: mod_base = OTHER; note = 2'-fluoroguanosine-3'-phosphate
  modified_base 20: mod_base = OTHER; note = 2'-O-methyluridine-3'-phosphate
  modified_base 21: mod_base = OTHER; note = 2'-fluorouridine-3'-phosphate N-[tris(GalNAc-alkyl)-amidodecanoyl)]-4-hydroxyprolinol Hyp-(GalNAc-alkyl)3
tttgggtctgtcctctctgtt

SEQ ID NO: 214 - RNA, 23 nt, synthetic construct
  source 1..23: mol_type = other RNA; note = Description of Artificial Sequence: Synthetic oligonucleotide
  modified_base 1: mod_base = OTHER; note = 2'-O-methyladenosine-3'-phosphate
  modified_base 2: mod_base = OTHER; note = 2'-fluoroadenosine-3'-phosphate
  modified_base 3: mod_base = OTHER; note = 2'-O-methylcytidine-3'-phosphate
  modified_base 4: mod_base = OTHER; note = 2'-fluoroadenosine-3'-phosphate
  modified_base 5: mod_base = OTHER; note = 2'-O-methylguanosine-3'-phosphate
  modified_base 6: mod_base = OTHER; note = 2'-fluoroadenosine-3'-phosphate
  modified_base 7: mod_base = OTHER; note = 2'-O-methylguanosine-3'-phosphate
  modified_base 8: mod_base = OTHER; note = 2'-fluoroadenosine-3'-phosphate
  modified_base 9: mod_base = OTHER; note = 2'-O-methylguanosine-3'-phosphate
  modified_base 10: mod_base = OTHER; note = 2'-fluoroguanosine-3'-phosphate
  modified_base 11: mod_base = OTHER; note = 2'-O-methyladenosine-3'-phosphate
  modified_base 12: mod_base = OTHER; note = 2'-O-methylcytidine-3'-phosphate
  modified_base 13: mod_base = OTHER; note = 2'-O-methyladenosine-3'-phosphate
  modified_base 14: mod_base = OTHER; note = 2'-fluoroguanosine-3'-phosphate
  modified_base 15: mod_base = OTHER; note = 2'-O-methyladenosine-3'-phosphate
  modified_base 16: mod_base = OTHER; note = 2'-fluorocytidine-3'-phosphate
  modified_base 17: mod_base = OTHER; note = 2'-O-methylcytidine-3'-phosphate
  modified_base 18: mod_base = OTHER; note = 2'-fluorocytidine-3'-phosphate
  modified_base 19: mod_base = OTHER; note = 2'-O-methyladenosine-3'-phosphate
  modified_base 20: mod_base = OTHER; note = 2'-fluoroadenosine-3'-phosphate
  modified_base 21: mod_base = OTHER; note = 2'-O-methyladenosine-3'-phosphorothioate
  modified_base 22: mod_base = OTHER; note = 2'-fluoroadenosine-3'-phosphorothioate
  modified_base 23: mod_base = OTHER; note = 2'-O-methylguanosine-3'-phosphate
aacagagaggacagacccaaaag

SEQ ID NO: 215 - RNA, 21 nt, synthetic construct
  source 1..21: mol_type = other RNA; note = Description of Artificial Sequence: Synthetic oligonucleotide
  modified_base 1: mod_base = OTHER; note = 2'-fluorouridine-3'-phosphate
  modified_base 2: mod_base = OTHER; note = 2'-O-methyluridine-3'-phosphate
  modified_base 3: mod_base = OTHER; note = 2'-fluoroguanosine-3'-phosphate
  modified_base 4: mod_base = OTHER; note = 2'-O-methylguanosine-3'-phosphate
  modified_base 5: mod_base = OTHER; note = 2'-fluoroguanosine-3'-phosphate
  modified_base 6: mod_base = OTHER; note = 2'-O-methyluridine-3'-phosphate
  modified_base 7: mod_base = OTHER; note = 2'-fluorocytidine-3'-phosphate
  modified_base 8: mod_base = OTHER; note = 2'-O-methyluridine-3'-phosphate
  modified_base 9: mod_base = OTHER; note = 2'-fluoroguanosine-3'-phosphate
  modified_base 10: mod_base = OTHER; note = 2'-fluorouridine-3'-phosphate
  modified_base 11: mod_base = OTHER; note = 2'-fluorocytidine-3'-phosphate
  modified_base 12: mod_base = OTHER; note = 2'-O-methylcytidine-3'-phosphate
  modified_base 13: mod_base = OTHER; note = 2'-fluorouridine-3'-phosphate
  modified_base 14: mod_base = OTHER; note = 2'-O-methylcytidine-3'-phosphate
  modified_base 15: mod_base = OTHER; note = 2'-fluorouridine-3'-phosphate
  modified_base 16: mod_base = OTHER; note = 2'-O-methylcytidine-3'-phosphate
  modified_base 17: mod_base = OTHER; note = 2'-fluorouridine-3'-phosphate
  modified_base 18: mod_base = OTHER; note = 2'-O-methylguanosine-3'-phosphate
  modified_base 19: mod_base = OTHER; note = 2'-fluorouridine-3'-phosphate
  modified_base 20: mod_base = OTHER; note = 2'-O-methyluridine-3'-phosphate
  modified_base 21: mod_base = OTHER; note = 2'-fluorouridine-3'-phosphate N-[tris(GalNAc-alkyl)-amidodecanoyl)]-4-hydroxyprolinol Hyp-(GalNAc-alkyl)3
ttgggtctgtcctctctgttt

SEQ ID NO: 216 - RNA, 23 nt, synthetic construct
  source 1..23: mol_type = other RNA; note = Description of Artificial Sequence: Synthetic oligonucleotide
  modified_base 1: mod_base = OTHER; note = 2'-O-methyladenosine-3'-phosphate
  modified_base 2: mod_base = OTHER; note = 2'-fluoroadenosine-3'-phosphate
  modified_base 3: mod_base = OTHER; note = 2'-O-methyladenosine-3'-phosphate
  modified_base 4: mod_base = OTHER; note = 2'-fluorocytidine-3'-phosphate
  modified_base 5: mod_base = OTHER; note = 2'-O-methyladenosine-3'-phosphate
  modified_base 6: mod_base = OTHER; note = 2'-fluoroguanosine-3'-phosphate
  modified_base 7: mod_base = OTHER; note = 2'-O-methyladenosine-3'-phosphate
  modified_base 8: mod_base = OTHER; note = 2'-fluoroguanosine-3'-phosphate
  modified_base 9: mod_base = OTHER; note = 2'-O-methyladenosine-3'-phosphate
  modified_base 10: mod_base = OTHER; note = 2'-fluoroguanosine-3'-phosphate
  modified_base 11: mod_base = OTHER; note = 2'-O-methylguanosine-3'-phosphate
  modified_base 12: mod_base = OTHER; note = 2'-O-methyladenosine-3'-phosphate
  modified_base 13: mod_base = OTHER; note = 2'-O-methylcytidine-3'-phosphate
  modified_base 14: mod_base = OTHER; note = 2'-fluoroadenosine-3'-phosphate
  modified_base 15: mod_base = OTHER; note = 2'-O-methylguanosine-3'-phosphate
  modified_base 16: mod_base = OTHER; note = 2'-fluoroadenosine-3'-phosphate
  modified_base 17: mod_base = OTHER; note = 2'-O-methylcytidine-3'-phosphate
  modified_base 18: mod_base = OTHER; note = 2'-fluorocytidine-3'-phosphate
  modified_base 19: mod_base = OTHER; note = 2'-O-methylcytidine-3'-phosphate
  modified_base 20: mod_base = OTHER; note = 2'-fluoroadenosine-3'-phosphate
  modified_base 21: mod_base = OTHER; note = 2'-O-methyladenosine-3'-phosphorothioate
  modified_base 22: mod_base = OTHER; note = 2'-fluoroadenosine-3'-phosphorothioate
  modified_base 23: mod_base = OTHER; note = 2'-O-methyladenosine-3'-phosphate
aaacagagaggacagacccaaaa

SEQ ID NO: 217 - RNA, 21 nt, synthetic construct
  source 1..21: mol_type = other RNA; note = Description of Artificial Sequence: Synthetic oligonucleotide
  modified_base 1: mod_base = OTHER; note = 2'-fluorouridine-3'-phosphate
  modified_base 2: mod_base = OTHER; note = 2'-O-methylguanosine-3'-phosphate
  modified_base 3: mod_base = OTHER; note = 2'-fluoroguanosine-3'-phosphate
  modified_base 4: mod_base = OTHER; note = 2'-O-methylguanosine-3'-phosphate
  modified_base 5: mod_base = OTHER; note = 2'-fluorouridine-3'-phosphate
  modified_base 6: mod_base = OTHER; note = 2'-O-methylcytidine-3'-phosphate
  modified_base 7: mod_base = OTHER; note = 2'-fluorouridine-3'-phosphate
  modified_base 8: mod_base = OTHER; note = 2'-O-methylguanosine-3'-phosphate
  modified_base 9: mod_base = OTHER; note = 2'-fluorouridine-3'-phosphate
  modified_base 10: mod_base = OTHER; note = 2'-fluorocytidine-3'-phosphate
  modified_base 11: mod_base = OTHER; note = 2'-fluorocytidine-3'-phosphate
  modified_base 12: mod_base = OTHER; note = 2'-O-methyluridine-3'-phosphate
  modified_base 13: mod_base = OTHER; note = 2'-fluorocytidine-3'-phosphate
  modified_base 14: mod_base = OTHER; note = 2'-O-methyluridine-3'-phosphate
  modified_base 15: mod_base = OTHER; note = 2'-fluorocytidine-3'-phosphate
  modified_base 16: mod_base = OTHER; note = 2'-O-methyluridine-3'-phosphate
  modified_base 17: mod_base = OTHER; note = 2'-fluoroguanosine-3'-phosphate
  modified_base 18: mod_base = OTHER; note = 2'-O-methyluridine-3'-phosphate
  modified_base 19: mod_base = OTHER; note = 2'-fluorouridine-3'-phosphate
  modified_base 20: mod_base = OTHER; note = 2'-O-methylguanosine-3'-phosphate
  modified_base 21: mod_base = OTHER; note = 2'-fluoroadenosine-3'-phosphate N-[tris(GalNAc-alkyl)-amidodecanoyl)]-4-hydroxyprolinol Hyp-(GalNAc-alkyl)3
tgggtctgtcctctctgttga

SEQ ID NO: 218 - RNA, 23 nt, synthetic construct
  source 1..23: mol_type = other RNA; note = Description of Artificial Sequence: Synthetic oligonucleotide
  modified_base 1: mod_base = OTHER; note = 2'-O-methyluridine-3'-phosphate
  modified_base 2: mod_base = OTHER; note = 2'-fluorocytidine-3'-phosphate
  modified_base 3: mod_base = OTHER; note = 2'-O-methyladenosine-3'-phosphate
  modified_base 4: mod_base = OTHER; note = 2'-fluoroadenosine-3'-phosphate
  modified_base 5: mod_base = OTHER; note = 2'-O-methylcytidine-3'-phosphate
  modified_base 6: mod_base = OTHER; note = 2'-fluoroadenosine-3'-phosphate
  modified_base 7: mod_base = OTHER; note = 2'-O-methylguanosine-3'-phosphate
  modified_base 8: mod_base = OTHER; note = 2'-fluoroadenosine-3'-phosphate
  modified_base 9: mod_base = OTHER; note = 2'-O-methylguanosine-3'-phosphate
  modified_base 10: mod_base = OTHER; note = 2'-fluoroadenosine-3'-phosphate
  modified_base 11: mod_base = OTHER; note = 2'-O-methylguanosine-3'-phosphate
  modified_base 12: mod_base = OTHER; note = 2'-O-methylguanosine-3'-phosphate
  modified_base 13: mod_base = OTHER; note = 2'-O-methyladenosine-3'-phosphate
  modified_base 14: mod_base = OTHER; note = 2'-fluorocytidine-3'-phosphate
  modified_base 15: mod_base = OTHER; note = 2'-O-methyladenosine-3'-phosphate
  modified_base 16: mod_base = OTHER; note = 2'-fluoroguanosine-3'-phosphate
  modified_base 17: mod_base = OTHER; note = 2'-O-methyladenosine-3'-phosphate
  modified_base 18: mod_base = OTHER; note = 2'-fluorocytidine-3'-phosphate
  modified_base 19: mod_base = OTHER; note = 2'-O-methylcytidine-3'-phosphate
  modified_base 20: mod_base = OTHER; note = 2'-fluorocytidine-3'-phosphate
  modified_base 21: mod_base = OTHER; note = 2'-O-methyladenosine-3'-phosphorothioate
  modified_base 22: mod_base = OTHER; note = 2'-fluoroadenosine-3'-phosphorothioate
  modified_base 23: mod_base = OTHER; note = 2'-O-methyladenosine-3'-phosphate
tcaacagagaggacagacccaaa

SEQ ID NO: 219 - RNA, 21 nt, synthetic construct
  source 1..21: mol_type = other RNA; note = Description of Artificial Sequence: Synthetic oligonucleotide
  modified_base 1: mod_base = OTHER; note = 2'-fluoroguanosine-3'-phosphate
  modified_base 2: mod_base = OTHER; note = 2'-O-methylguanosine-3'-phosphate
  modified_base 3: mod_base = OTHER; note = 2'-fluoroguanosine-3'-phosphate
  modified_base 4: mod_base = OTHER; note = 2'-O-methyluridine-3'-phosphate
  modified_base 5: mod_base = OTHER; note = 2'-fluorocytidine-3'-phosphate
  modified_base 6: mod_base = OTHER; note = 2'-O-methyluridine-3'-phosphate
  modified_base 7: mod_base = OTHER; note = 2'-fluoroguanosine-3'-phosphate
  modified_base 8: mod_base = OTHER; note = 2'-O-methyluridine-3'-phosphate
  modified_base 9: mod_base = OTHER; note = 2'-fluorocytidine-3'-phosphate
  modified_base 10: mod_base = OTHER; note = 2'-fluorocytidine-3'-phosphate
  modified_base 11: mod_base = OTHER; note = 2'-fluorouridine-3'-phosphate
  modified_base 12: mod_base = OTHER; note = 2'-O-methylcytidine-3'-phosphate
  modified_base 13: mod_base = OTHER; note = 2'-fluorouridine-3'-phosphate
  modified_base 14: mod_base = OTHER; note = 2'-O-methylcytidine-3'-phosphate
  modified_base 15: mod_base = OTHER; note = 2'-fluorouridine-3'-phosphate
  modified_base 16: mod_base = OTHER; note = 2'-O-methylguanosine-3'-phosphate
  modified_base 17: mod_base = OTHER; note = 2'-fluorouridine-3'-phosphate
  modified_base 18: mod_base = OTHER; note = 2'-O-methyluridine-3'-phosphate
  modified_base 19: mod_base = OTHER; note = 2'-fluoroguanosine-3'-phosphate
  modified_base 20: mod_base = OTHER; note = 2'-O-methylcytidine-3'-phosphate
  modified_base 21: mod_base = OTHER; note = 2'-fluoroadenosine-3'-phosphate N-[tris(GalNAc-alkyl)-amidodecanoyl)]-4-hydroxyprolinol Hyp-(GalNAc-alkyl)3
gggtctgtcctctctgttgca

SEQ ID NO: 220 - RNA, 23 nt, synthetic construct
  source 1..23: mol_type = other RNA; note = Description of Artificial Sequence: Synthetic oligonucleotide
  modified_base 1: mod_base = OTHER; note = 2'-O-methyluridine-3'-phosphate
  modified_base 2: mod_base = OTHER; note = 2'-fluoroguanosine-3'-phosphate
  modified_base 3: mod_base = OTHER; note = 2'-O-methylcytidine-3'-phosphate
  modified_base 4: mod_base = OTHER; note = 2'-fluoroadenosine-3'-phosphate
  modified_base 5: mod_base = OTHER; note = 2'-O-methyladenosine-3'-phosphate
  modified_base 6: mod_base = OTHER; note = 2'-fluorocytidine-3'-phosphate
  modified_base 7: mod_base = OTHER; note = 2'-O-methyladenosine-3'-phosphate
  modified_base 8: mod_base = OTHER; note = 2'-fluoroguanosine-3'-phosphate
  modified_base 9: mod_base = OTHER; note = 2'-O-methyladenosine-3'-phosphate
  modified_base 10: mod_base = OTHER; note = 2'-fluoroguanosine-3'-phosphate
  modified_base 11: mod_base = OTHER; note = 2'-O-methyladenosine-3'-phosphate
  modified_base 12: mod_base = OTHER; note = 2'-O-methylguanosine-3'-phosphate
  modified_base 13: mod_base = OTHER; note = 2'-O-methylguanosine-3'-phosphate
  modified_base 14: mod_base = OTHER; note = 2'-fluoroadenosine-3'-phosphate
  modified_base 15: mod_base = OTHER; note = 2'-O-methylcytidine-3'-phosphate
  modified_base 16: mod_base = OTHER; note = 2'-fluoroadenosine-3'-phosphate
  modified_base 17: mod_base = OTHER; note = 2'-O-methylguanosine-3'-phosphate
  modified_base 18: mod_base = OTHER; note = 2'-fluoroadenosine-3'-phosphate
  modified_base 19: mod_base = OTHER; note = 2'-O-methylcytidine-3'-phosphate
  modified_base 20: mod_base = OTHER; note = 2'-fluorocytidine-3'-phosphate
  modified_base 21: mod_base = OTHER; note = 2'-O-methylcytidine-3'-phosphorothioate
  modified_base 22: mod_base = OTHER; note = 2'-fluoroadenosine-3'-phosphorothioate
  modified_base 23: mod_base = OTHER; note = 2'-O-methyladenosine-3'-phosphate
tgcaacagagaggacagacccaa

SEQ ID NO: 221 - RNA, 21 nt, synthetic construct
  source 1..21: mol_type = other RNA; note = Description of Artificial Sequence: Synthetic oligonucleotide
  modified_base 1: mod_base = OTHER; note = 2'-fluoroguanosine-3'-phosphate
  modified_base 2: mod_base = OTHER; note = 2'-O-methylguanosine-3'-phosphate
  modified_base 3: mod_base = OTHER; note = 2'-fluorouridine-3'-phosphate
  modified_base 4: mod_base = OTHER; note = 2'-O-methylcytidine-3'-phosphate
  modified_base 5: mod_base = OTHER; note = 2'-fluorouridine-3'-phosphate
  modified_base 6: mod_base = OTHER; note = 2'-O-methylguanosine-3'-phosphate
  modified_base 7: mod_base = OTHER; note = 2'-fluorouridine-3'-phosphate
  modified_base 8: mod_base = OTHER; note = 2'-O-methylcytidine-3'-phosphate
  modified_base 9: mod_base = OTHER; note = 2'-fluorocytidine-3'-phosphate
  modified_base 10: mod_base = OTHER; note = 2'-fluorouridine-3'-phosphate
  modified_base 11: mod_base = OTHER; note = 2'-fluorocytidine-3'-phosphate
  modified_base 12: mod_base = OTHER; note = 2'-O-methyluridine-3'-phosphate
  modified_base 13: mod_base = OTHER; note = 2'-fluorocytidine-3'-phosphate
  modified_base 14: mod_base = OTHER; note = 2'-O-methyluridine-3'-phosphate
  modified_base 15: mod_base = OTHER; note = 2'-fluoroguanosine-3'-phosphate
  modified_base 16: mod_base = OTHER; note = 2'-O-methyluridine-3'-phosphate
  modified_base 17: mod_base = OTHER; note = 2'-fluorouridine-3'-phosphate
  modified_base 18: mod_base = OTHER; note = 2'-O-methylguanosine-3'-phosphate
  modified_base 19: mod_base = OTHER; note = 2'-fluorocytidine-3'-phosphate
  modified_base 20: mod_base = OTHER; note = 2'-O-methylcytidine-3'-phosphate
  modified_base 21: mod_base = OTHER; note = 2'-fluorouridine-3'-phosphate N-[tris(GalNAc-alkyl)-amidodecanoyl)]-4-hydroxyprolinol Hyp-(GalNAc-alkyl)3
ggtctgtcctctctgttgcct

SEQ ID NO: 222 - RNA, 23 nt, synthetic construct
  source 1..23: mol_type = other RNA; note = Description of Artificial Sequence: Synthetic oligonucleotide
  modified_base 1: mod_base = OTHER; note = 2'-O-methyladenosine-3'-phosphate
  modified_base 2: mod_base = OTHER; note = 2'-fluoroguanosine-3'-phosphate
  modified_base 3: mod_base = OTHER; note = 2'-O-methylguanosine-3'-phosphate
  modified_base 4: mod_base = OTHER; note = 2'-fluorocytidine-3'-phosphate
  modified_base 5: mod_base = OTHER; note = 2'-O-methyladenosine-3'-phosphate
  modified_base 6: mod_base = OTHER; note = 2'-fluoroadenosine-3'-phosphate
  modified_base 7: mod_base = OTHER; note = 2'-O-methylcytidine-3'-phosphate
  modified_base 8: mod_base = OTHER; note = 2'-fluoroadenosine-3'-phosphate
  modified_base 9: mod_base = OTHER; note = 2'-O-methylguanosine-3'-phosphate
  modified_base 10: mod_base = OTHER; note = 2'-fluoroadenosine-3'-phosphate
  modified_base 11: mod_base = OTHER; note = 2'-O-methylguanosine-3'-phosphate
  modified_base 12: mod_base = OTHER; note = 2'-O-methyladenosine-3'-phosphate
  modified_base 13: mod_base = OTHER; note = 2'-O-methylguanosine-3'-phosphate
  modified_base 14: mod_base = OTHER; note = 2'-fluoroguanosine-3'-phosphate
  modified_base 15: mod_base = OTHER; note = 2'-O-methyladenosine-3'-phosphate
  modified_base 16: mod_base = OTHER; note = 2'-fluorocytidine-3'-phosphate
  modified_base 17: mod_base = OTHER; note = 2'-O-methyladenosine-3'-phosphate
  modified_base 18: mod_base = OTHER; note = 2'-fluoroguanosine-3'-phosphate
  modified_base 19: mod_base = OTHER; note = 2'-O-methyladenosine-3'-phosphate
  modified_base 20: mod_base = OTHER; note = 2'-fluorocytidine-3'-phosphate
  modified_base 21: mod_base = OTHER; note = 2'-O-methylcytidine-3'-phosphorothioate
  modified_base 22: mod_base = OTHER; note = 2'-fluorocytidine-3'-phosphorothioate
  modified_base 23: mod_base = OTHER; note = 2'-O-methyladenosine-3'-phosphate
aggcaacagagaggacagaccca

SEQ ID NO: 223 - RNA, 21 nt, synthetic construct
  source 1..21: mol_type = other RNA; note = Description of Artificial Sequence: Synthetic oligonucleotide
  modified_base 1: mod_base = OTHER; note = 2'-fluoroguanosine-3'-phosphate
  modified_base 2: mod_base = OTHER; note = 2'-O-methyluridine-3'-phosphate
  modified_base 3: mod_base = OTHER; note = 2'-fluorocytidine-3'-phosphate
  modified_base 4: mod_base = OTHER; note = 2'-O-methyluridine-3'-phosphate
  modified_base 5: mod_base = OTHER; note = 2'-fluoroguanosine-3'-phosphate
  modified_base 6: mod_base = OTHER; note = 2'-O-methyluridine-3'-phosphate
  modified_base 7: mod_base = OTHER; note = 2'-fluorocytidine-3'-phosphate
  modified_base 8: mod_base = OTHER; note = 2'-O-methylcytidine-3'-phosphate
  modified_base 9: mod_base = OTHER; note = 2'-fluorouridine-3'-phosphate
  modified_base 10: mod_base = OTHER; note = 2'-fluorocytidine-3'-phosphate
  modified_base 11: mod_base = OTHER; note = 2'-fluorouridine-3'-phosphate
  modified_base 12: mod_base = OTHER; note = 2'-O-methylcytidine-3'-phosphate
  modified_base 13: mod_base = OTHER; note = 2'-fluorouridine-3'-phosphate
  modified_base 14: mod_base = OTHER; note = 2'-O-methylguanosine-3'-phosphate
  modified_base 15: mod_base = OTHER; note = 2'-fluorouridine-3'-phosphate
  modified_base 16: mod_base = OTHER; note = 2'-O-methyluridine-3'-phosphate
  modified_base 17: mod_base = OTHER; note = 2'-fluoroguanosine-3'-phosphate
  modified_base 18: mod_base = OTHER; note = 2'-O-methylcytidine-3'-phosphate
  modified_base 19: mod_base = OTHER; note = 2'-fluorocytidine-3'-phosphate
  modified_base 20: mod_base = OTHER; note = 2'-O-methyluridine-3'-phosphate
  modified_base 21: mod_base = OTHER; note = 2'-fluorouridine-3'-phosphate N-[tris(GalNAc-alkyl)-amidodecanoyl)]-4-hydroxyprolinol Hyp-(GalNAc-alkyl)3
gtctgtcctctctgttgcctt

SEQ ID NO: 224 - RNA, 23 nt, synthetic construct
  source 1..23: mol_type = other RNA; note = Description of Artificial Sequence: Synthetic oligonucleotide
  modified_base 1: mod_base = OTHER; note = 2'-O-methyladenosine-3'-phosphate
  modified_base 2: mod_base = OTHER; note = 2'-fluoroadenosine-3'-phosphate
  modified_base 3: mod_base = OTHER; note = 2'-O-methylguanosine-3'-phosphate
  modified_base 4: mod_base = OTHER; note = 2'-fluoroguanosine-3'-phosphate
  modified_base 5: mod_base = OTHER; note = 2'-O-methylcytidine-3'-phosphate
  modified_base 6: mod_base = OTHER; note = 2'-fluoroadenosine-3'-phosphate
  modified_base 7: mod_base = OTHER; note = 2'-O-methyladenosine-3'-phosphate
  modified_base 8: mod_base = OTHER; note = 2'-fluorocytidine-3'-phosphate
  modified_base 9: mod_base = OTHER; note = 2'-O-methyladenosine-3'-phosphate
  modified_base 10: mod_base = OTHER; note = 2'-fluoroguanosine-3'-phosphate
  modified_base 11: mod_base = OTHER; note = 2'-O-methyladenosine-3'-phosphate
  modified_base 12: mod_base = OTHER; note = 2'-O-methylguanosine-3'-phosphate
  modified_base 13: mod_base = OTHER; note = 2'-O-methyladenosine-3'-phosphate
  modified_base 14: mod_base = OTHER; note = 2'-fluoroguanosine-3'-phosphate
  modified_base 15: mod_base = OTHER; note = 2'-O-methylguanosine-3'-phosphate
  modified_base 16: mod_base = OTHER; note = 2'-fluoroadenosine-3'-phosphate
  modified_base 17: mod_base = OTHER; note = 2'-O-methylcytidine-3'-phosphate
  modified_base 18: mod_base = OTHER; note = 2'-fluoroadenosine-3'-phosphate
  modified_base 19: mod_base = OTHER; note = 2'-O-methylguanosine-3'-phosphate
  modified_base 20: mod_base = OTHER; note = 2'-fluoroadenosine-3'-phosphate
  modified_base 21: mod_base = OTHER; note = 2'-O-methylcytidine-3'-phosphorothioate
  modified_base 22: mod_base = OTHER; note = 2'-fluorocytidine-3'-phosphorothioate
  modified_base 23: mod_base = OTHER; note = 2'-O-methylcytidine-3'-phosphate
aaggcaacagagaggacagaccc

SEQ ID NO: 225 - RNA, 21 nt, synthetic construct
  source 1..21: mol_type = other RNA; note = Description of Artificial Sequence: Synthetic oligonucleotide
  modified_base 1: mod_base = OTHER; note = 2'-fluorouridine-3'-phosphate
  modified_base 2: mod_base = OTHER; note = 2'-O-methylcytidine-3'-phosphate
  modified_base 3: mod_base = OTHER; note = 2'-fluorouridine-3'-phosphate
  modified_base 4: mod_base = OTHER; note = 2'-O-methylguanosine-3'-phosphate
  modified_base 5: mod_base = OTHER; note = 2'-fluorouridine-3'-phosphate
  modified_base 6: mod_base = OTHER; note = 2'-O-methylcytidine-3'-phosphate
  modified_base 7: mod_base = OTHER; note = 2'-fluorocytidine-3'-phosphate
  modified_base 8: mod_base = OTHER; note = 2'-O-methyluridine-3'-phosphate
  modified_base 9: mod_base = OTHER; note = 2'-fluorocytidine-3'-phosphate
  modified_base 10: mod_base = OTHER; note = 2'-fluorouridine-3'-phosphate
  modified_base 11: mod_base = OTHER; note = 2'-fluorocytidine-3'-phosphate
  modified_base 12: mod_base = OTHER; note = 2'-O-methyluridine-3'-phosphate
  modified_base 13: mod_base = OTHER; note = 2'-fluoroguanosine-3'-phosphate
  modified_base 14: mod_base = OTHER; note = 2'-O-methyluridine-3'-phosphate
  modified_base 15: mod_base = OTHER; note = 2'-fluorouridine-3'-phosphate
  modified_base 16: mod_base = OTHER; note = 2'-O-methylguanosine-3'-phosphate
  modified_base 17: mod_base = OTHER; note = 2'-fluorocytidine-3'-phosphate
  modified_base 18: mod_base = OTHER; note = 2'-O-methylcytidine-3'-phosphate
  modified_base 19: mod_base = OTHER; note = 2'-fluorouridine-3'-phosphate
  modified_base 20: mod_base = OTHER; note = 2'-O-methyluridine-3'-phosphate
  modified_base 21: mod_base = OTHER; note = 2'-fluorouridine-3'-phosphate N-[tris(GalNAc-alkyl)-amidodecanoyl)]-4-hydroxyprolinol Hyp-(GalNAc-alkyl)3
tctgtcctctctgttgccttt

SEQ ID NO: 226 - RNA, 23 nt, synthetic construct
  source 1..23: mol_type = other RNA; note = Description of Artificial Sequence: Synthetic oligonucleotide
  modified_base 1: mod_base = OTHER; note = 2'-O-methyladenosine-3'-phosphate
  modified_base 2: mod_base = OTHER; note = 2'-fluoroadenosine-3'-phosphate
  modified_base 3: mod_base = OTHER; note = 2'-O-methyladenosine-3'-phosphate
  modified_base 4: mod_base = OTHER; note = 2'-fluoroguanosine-3'-phosphate
  modified_base 5: mod_base = OTHER; note = 2'-O-methylguanosine-3'-phosphate
  modified_base 6: mod_base = OTHER; note = 2'-fluorocytidine-3'-phosphate
  modified_base 7: mod_base = OTHER; note = 2'-O-methyladenosine-3'-phosphate
  modified_base 8: mod_base = OTHER; note = 2'-fluoroadenosine-3'-phosphate
  modified_base 9: mod_base = OTHER; note = 2'-O-methylcytidine-3'-phosphate
  modified_base 10: mod_base = OTHER; note = 2'-fluoroadenosine-3'-phosphate
  modified_base 11: mod_base = OTHER; note = 2'-O-methylguanosine-3'-phosphate
  modified_base 12: mod_base = OTHER; note = 2'-O-methyladenosine-3'-phosphate
  modified_base 13: mod_base = OTHER; note = 2'-O-methylguanosine-3'-phosphate
  modified_base 14: mod_base = OTHER; note = 2'-fluoroadenosine-3'-phosphate
  modified_base 15: mod_base = OTHER; note = 2'-O-methylguanosine-3'-phosphate
  modified_base 16: mod_base = OTHER; note = 2'-fluoroguanosine-3'-phosphate
  modified_base 17: mod_base = OTHER; note = 2'-O-methyladenosine-3'-phosphate
  modified_base 18: mod_base = OTHER; note = 2'-fluorocytidine-3'-phosphate
  modified_base 19: mod_base = OTHER; note = 2'-O-methyladenosine-3'-phosphate
  modified_base 20: mod_base = OTHER; note = 2'-fluoroguanosine-3'-phosphate
  modified_base 21: mod_base = OTHER; note = 2'-O-methyladenosine-3'-phosphorothioate
  modified_base 22: mod_base = OTHER; note = 2'-fluorocytidine-3'-phosphorothioate
  modified_base 23: mod_base = OTHER; note = 2'-O-methylcytidine-3'-phosphate
aaaggcaacagagaggacagacc

SEQ ID NO: 227 - RNA, 21 nt, synthetic construct
  source 1..21: mol_type = other RNA; note = Description of Artificial Sequence: Synthetic oligonucleotide
  modified_base 1: mod_base = OTHER; note = 2'-fluorocytidine-3'-phosphate
  modified_base 2: mod_base = OTHER; note = 2'-O-methyluridine-3'-phosphate
  modified_base 3: mod_base = OTHER; note = 2'-fluoroguanosine-3'-phosphate
  modified_base 4: mod_base = OTHER; note = 2'-O-methyluridine-3'-phosphate
  modified_base 5: mod_base = OTHER; note = 2'-fluorocytidine-3'-phosphate
  modified_base 6: mod_base = OTHER; note = 2'-O-methylcytidine-3'-phosphate
  modified_base 7: mod_base = OTHER; note = 2'-fluorouridine-3'-phosphate
  modified_base 8: mod_base = OTHER; note = 2'-O-methylcytidine-3'-phosphate
  modified_base 9: mod_base = OTHER; note = 2'-fluorouridine-3'-phosphate
  modified_base 10: mod_base = OTHER; note = 2'-fluorocytidine-3'-phosphate
  modified_base 11: mod_base = OTHER; note = 2'-fluorouridine-3'-phosphate
  modified_base 12: mod_base = OTHER; note = 2'-O-methylguanosine-3'-phosphate
  modified_base 13: mod_base = OTHER; note = 2'-fluorouridine-3'-phosphate
  modified_base 14: mod_base = OTHER; note = 2'-O-methyluridine-3'-phosphate
  modified_base 15: mod_base = OTHER; note = 2'-fluoroguanosine-3'-phosphate
  modified_base 16: mod_base = OTHER; note = 2'-O-methylcytidine-3'-phosphate
  modified_base 17: mod_base = OTHER; note = 2'-fluorocytidine-3'-phosphate
  modified_base 18: mod_base = OTHER; note = 2'-O-methyluridine-3'-phosphate
  modified_base 19: mod_base = OTHER; note = 2'-fluorouridine-3'-phosphate
  modified_base 20: mod_base = OTHER; note = 2'-O-methyluridine-3'-phosphate
  modified_base 21: mod_base = OTHER; note = 2'-fluorouridine-3'-phosphate N-[tris(GalNAc-alkyl)-amidodecanoyl)]-4-hydroxyprolinol Hyp-(GalNAc-alkyl)3
ctgtcctctctgttgcctttt

SEQ ID NO: 228 - RNA, 23 nt, synthetic construct
  source 1..23: mol_type = other RNA; note = Description of Artificial Sequence: Synthetic oligonucleotide
  modified_base 1: mod_base = OTHER; note = 2'-O-methyladenosine-3'-phosphate
  modified_base 2: mod_base = OTHER; note = 2'-fluoroadenosine-3'-phosphate
  modified_base 3: mod_base = OTHER; note = 2'-O-methyladenosine-3'-phosphate
  modified_base 4: mod_base = OTHER; note = 2'-fluoroadenosine-3'-phosphate
  modified_base 5: mod_base = OTHER; note = 2'-O-methylguanosine-3'-phosphate
  modified_base 6: mod_base = OTHER; note = 2'-fluoroguanosine-3'-phosphate
  modified_base 7: mod_base = OTHER; note = 2'-O-methylcytidine-3'-phosphate
  modified_base 8: mod_base = OTHER; note = 2'-fluoroadenosine-3'-phosphate
  modified_base 9: mod_base = OTHER; note = 2'-O-methyladenosine-3'-phosphate
  modified_base 10: mod_base = OTHER; note = 2'-fluorocytidine-3'-phosphate
  modified_base 11: mod_base = OTHER; note = 2'-O-methyladenosine-3'-phosphate
  modified_base 12: mod_base = OTHER; note = 2'-O-methylguanosine-3'-phosphate
  modified_base 13: mod_base = OTHER; note = 2'-O-methyladenosine-3'-phosphate
  modified_base 14: mod_base = OTHER; note = 2'-fluoroguanosine-3'-phosphate
  modified_base 15: mod_base = OTHER; note = 2'-O-methyladenosine-3'-phosphate
  modified_base 16: mod_base = OTHER; note = 2'-fluoroguanosine-3'-phosphate
  modified_base 17: mod_base = OTHER; note = 2'-O-methylguanosine-3'-phosphate
  modified_base 18: mod_base = OTHER; note = 2'-fluoroadenosine-3'-phosphate
  modified_base 19: mod_base = OTHER; note = 2'-O-methylcytidine-3'-phosphate
  modified_base 20: mod_base = OTHER; note = 2'-fluoroadenosine-3'-phosphate
  modified_base 21: mod_base = OTHER; note = 2'-O-methylguanosine-3'-phosphorothioate
  modified_base 22: mod_base = OTHER; note = 2'-fluoroadenosine-3'-phosphorothioate
  modified_base 23: mod_base = OTHER; note = 2'-O-methylcytidine-3'-phosphate
aaaaggcaacagagaggacagac

SEQ ID NO: 229 - RNA, 21 nt, synthetic construct
  source 1..21: mol_type = other RNA; note = Description of Artificial Sequence: Synthetic oligonucleotide
  modified_base 1: mod_base = OTHER; note = 2'-fluorouridine-3'-phosphate
  modified_base 2: mod_base = OTHER; note = 2'-O-methylguanosine-3'-phosphate
  modified_base 3: mod_base = OTHER; note = 2'-fluorouridine-3'-phosphate
  modified_base 4: mod_base = OTHER; note = 2'-O-methylcytidine-3'-phosphate
  modified_base 5: mod_base = OTHER; note = 2'-fluorocytidine-3'-phosphate
  modified_base 6: mod_base = OTHER; note = 2'-O-methyluridine-3'-phosphate
  modified_base 7: mod_base = OTHER; note = 2'-fluorocytidine-3'-phosphate
  modified_base 8: mod_base = OTHER; note = 2'-O-methyluridine-3'-phosphate
  modified_base 9: mod_base = OTHER; note = 2'-fluorocytidine-3'-phosphate
  modified_base 10: mod_base = OTHER; note = 2'-fluorouridine-3'-phosphate
  modified_base 11: mod_base = OTHER; note = 2'-fluoroguanosine-3'-phosphate
  modified_base 12: mod_base = OTHER; note = 2'-O-methyluridine-3'-phosphate
  modified_base 13: mod_base = OTHER; note = 2'-fluorouridine-3'-phosphate
  modified_base 14: mod_base = OTHER; note = 2'-O-methylguanosine-3'-phosphate
  modified_base 15: mod_base = OTHER; note = 2'-fluorocytidine-3'-phosphate
  modified_base 16: mod_base = OTHER; note = 2'-O-methylcytidine-3'-phosphate
  modified_base 17: mod_base = OTHER; note = 2'-fluorouridine-3'-phosphate
  modified_base 18: mod_base = OTHER; note = 2'-O-methyluridine-3'-phosphate
  modified_base 19: mod_base = OTHER; note = 2'-fluorouridine-3'-phosphate
  modified_base 20: mod_base = OTHER; note = 2'-O-methyluridine-3'-phosphate
  modified_base 21: mod_base = OTHER; note = 2'-fluorouridine-3'-phosphate N-[tris(GalNAc-alkyl)-amidodecanoyl)]-4-hydroxyprolinol Hyp-(GalNAc-alkyl)3
tgtcctctctgttgccttttt

SEQ ID NO: 230 - RNA, 23 nt, synthetic construct
  source 1..23: mol_type = other RNA; note = Description of Artificial Sequence: Synthetic oligonucleotide
  modified_base 1: mod_base = OTHER; note = 2'-O-methyladenosine-3'-phosphate
  modified_base 2: mod_base = OTHER; note = 2'-fluoroadenosine-3'-phosphate
  modified_base 3: mod_base = OTHER; note = 2'-O-methyladenosine-3'-phosphate
  modified_base 4: mod_base = OTHER; note = 2'-fluoroadenosine-3'-phosphate
  modified_base 5: mod_base = OTHER; note = 2'-O-methyladenosine-3'-phosphate
  modified_base 6: mod_base = OTHER; note = 2'-fluoroguanosine-3'-phosphate
  modified_base 7: mod_base = OTHER; note = 2'-O-methylguanosine-3'-phosphate
  modified_base 8: mod_base = OTHER; note = 2'-fluorocytidine-3'-phosphate
  modified_base 9: mod_base = OTHER; note = 2'-O-methyladenosine-3'-phosphate
  modified_base 10: mod_base = OTHER; note = 2'-fluoroadenosine-3'-phosphate
  modified_base 11: mod_base = OTHER; note = 2'-O-methylcytidine-3'-phosphate
  modified_base 12: mod_base = OTHER; note = 2'-O-methyladenosine-3'-phosphate
  modified_base 13: mod_base = OTHER; note = 2'-O-methylguanosine-3'-phosphate
  modified_base 14: mod_base = OTHER; note = 2'-fluoroadenosine-3'-phosphate
  modified_base 15: mod_base = OTHER; note = 2'-O-methylguanosine-3'-phosphate
  modified_base 16: mod_base = OTHER; note = 2'-fluoroadenosine-3'-phosphate
  modified_base 17: mod_base = OTHER; note = 2'-O-methylguanosine-3'-phosphate
  modified_base 18: mod_base = OTHER; note = 2'-fluoroguanosine-3'-phosphate
  modified_base 19: mod_base = OTHER; note = 2'-O-methyladenosine-3'-phosphate
  modified_base 20: mod_base = OTHER; note = 2'-fluorocytidine-3'-phosphate
  modified_base 21: mod_base = OTHER; note = 2'-O-methyladenosine-3'-phosphorothioate
  modified_base 22: mod_base = OTHER; note = 2'-fluoroguanosine-3'-phosphorothioate
  modified_base 23: mod_base = OTHER; note = 2'-O-methyladenosine-3'-phosphate
aaaaaggcaacagagaggacaga

SEQ ID NO: 231 - RNA, 21 nt, synthetic construct
  source 1..21: mol_type = other RNA; note = Description of Artificial Sequence: Synthetic oligonucleotide
  modified_base 1: mod_base = OTHER; note = 2'-fluoroguanosine-3'-phosphate
  modified_base 2: mod_base = OTHER; note = 2'-O-methyluridine-3'-phosphate
  modified_base 3: mod_base = OTHER; note = 2'-fluorocytidine-3'-phosphate
  modified_base 4: mod_base = OTHER; note = 2'-O-methylcytidine-3'-phosphate
  modified_base 5: mod_base = OTHER; note = 2'-fluorouridine-3'-phosphate
  modified_base 6: mod_base = OTHER; note = 2'-O-methylcytidine-3'-phosphate
  modified_base 7: mod_base = OTHER; note = 2'-fluorouridine-3'-phosphate
  modified_base 8: mod_base = OTHER; note = 2'-O-methylcytidine-3'-phosphate
  modified_base 9: mod_base = OTHER; note = 2'-fluorouridine-3'-phosphate
  modified_base 10: mod_base = OTHER; note = 2'-fluoroguanosine-3'-phosphate
  modified_base 11: mod_base = OTHER; note = 2'-fluorouridine-3'-phosphate
  modified_base 12: mod_base = OTHER; note = 2'-O-methyluridine-3'-phosphate
  modified_base 13: mod_base = OTHER; note = 2'-fluoroguanosine-3'-phosphate
  modified_base 14: mod_base = OTHER; note = 2'-O-methylcytidine-3'-phosphate
  modified_base 15: mod_base = OTHER; note = 2'-fluorocytidine-3'-phosphate
  modified_base 16: mod_base = OTHER; note = 2'-O-methyluridine-3'-phosphate
  modified_base 17: mod_base = OTHER; note = 2'-fluorouridine-3'-phosphate
  modified_base 18: mod_base = OTHER; note = 2'-O-methyluridine-3'-phosphate
  modified_base 19: mod_base = OTHER; note = 2'-fluorouridine-3'-phosphate
  modified_base 20: mod_base = OTHER; note = 2'-O-methyluridine-3'-phosphate
  modified_base 21: mod_base = OTHER; note = 2'-fluoroadenosine-3'-phosphate N-[tris(GalNAc-alkyl)-amidodecanoyl)]-4-hydroxyprolinol Hyp-(GalNAc-alkyl)3
gtcctctctgttgccttttta

SEQ ID NO: 232 - RNA, 23 nt, synthetic construct
  source 1..23: mol_type = other RNA; note = Description of Artificial Sequence: Synthetic oligonucleotide
  modified_base 1: mod_base = OTHER; note = 2'-O-methyluridine-3'-phosphate
  modified_base 2: mod_base = OTHER; note = 2'-fluoroadenosine-3'-phosphate
  modified_base 3: mod_base = OTHER; note = 2'-O-methyladenosine-3'-phosphate
  modified_base 4: mod_base = OTHER; note = 2'-fluoroadenosine-3'-phosphate
  modified_base 5: mod_base = OTHER; note = 2'-O-methyladenosine-3'-phosphate
  modified_base 6: mod_base = OTHER; note = 2'-fluoroadenosine-3'-phosphate
  modified_base 7: mod_base = OTHER; note = 2'-O-methylguanosine-3'-phosphate
  modified_base 8: mod_base = OTHER; note = 2'-fluoroguanosine-3'-phosphate
  modified_base 9: mod_base = OTHER; note = 2'-O-methylcytidine-3'-phosphate
  modified_base 10: mod_base = OTHER; note = 2'-fluoroadenosine-3'-phosphate
  modified_base 11: mod_base = OTHER; note = 2'-O-methyladenosine-3'-phosphate
  modified_base 12: mod_base = OTHER; note = 2'-O-methylcytidine-3'-phosphate
  modified_base 13: mod_base = OTHER; note = 2'-O-methyladenosine-3'-phosphate
  modified_base 14: mod_base = OTHER; note = 2'-fluoroguanosine-3'-phosphate
  modified_base 15: mod_base = OTHER; note = 2'-O-methyladenosine-3'-phosphate
  modified_base 16: mod_base = OTHER; note = 2'-fluoroguanosine-3'-phosphate
  modified_base 17: mod_base = OTHER; note = 2'-O-methyladenosine-3'-phosphate
  modified_base 18: mod_base = OTHER; note = 2'-fluoroguanosine-3'-phosphate
  modified_base 19: mod_base = OTHER; note = 2'-O-methylguanosine-3'-phosphate
  modified_base 20: mod_base = OTHER; note = 2'-fluoroadenosine-3'-phosphate
  modified_base 21: mod_base = OTHER; note = 2'-O-methylcytidine-3'-phosphorothioate
  modified_base 22: mod_base = OTHER; note = 2'-fluoroadenosine-3'-phosphorothioate
  modified_base 23: mod_base = OTHER; note = 2'-O-methylguanosine-3'-phosphate
taaaaaggcaacagagaggacag

SEQ ID NO: 233 - RNA, 21 nt, synthetic construct
  source 1..21: mol_type = other RNA; note = Description of Artificial Sequence: Synthetic oligonucleotide
  modified_base 1: mod_base = OTHER; note = 2'-fluorouridine-3'-phosphorothioate
  modified_base 2: mod_base = OTHER; note = 2'-O-methyluridine-3'-phosphorothioate
  modified_base 3: mod_base = OTHER; note = 2'-fluorouridine-3'-phosphate
  modified_base 4: mod_base = OTHER; note = 2'-O-methyluridine-3'-phosphate
  modified_base 5: mod_base = OTHER; note = 2'-fluorocytidine-3'-phosphate
  modified_base 6: mod_base = OTHER; note = 2'-O-methyluridine-3'-phosphate
  modified_base 7: mod_base = OTHER; note = 2'-fluoroadenosine-3'-phosphate
  modified_base 8: mod_base = OTHER; note = 2'-O-methylguanosine-3'-phosphate
  modified_base 9: mod_base = OTHER; note = 2'-fluoroadenosine-3'-phosphate
  modified_base 10: mod_base = OTHER; note = 2'-fluorocytidine-3'-phosphate
  modified_base 11: mod_base = OTHER; note = 2'-fluorocytidine-3'-phosphate
  modified_base 12: mod_base = OTHER; note = 2'-O-methyluridine-3'-phosphate
  modified_base 13: mod_base = OTHER; note = 2'-fluoroguanosine-3'-phosphate
  modified_base 14: mod_base = OTHER; note = 2'-O-methyluridine-3'-phosphate
  modified_base 15: mod_base = OTHER; note = 2'-fluorouridine-3'-phosphate
  modified_base 16: mod_base = OTHER; note = 2'-O-methyluridine-3'-phosphate
  modified_base 17: mod_base = OTHER; note = 2'-fluorouridine-3'-phosphate
  modified_base 18: mod_base = OTHER; note = 2'-O-methylguanosine-3'-phosphate
  modified_base 19: mod_base = OTHER; note = 2'-fluorocytidine-3'-phosphate
  modified_base 20: mod_base = OTHER; note = 2'-O-methyluridine-3'-phosphate
  modified_base 21: mod_base = OTHER; note = 2'-fluorouridine-3'-phosphate N-[tris(GalNAc-alkyl)-amidodecanoyl)]-4-hydroxyprolinol Hyp-(GalNAc-alkyl)3
ttttctagacctgttttgctt

SEQ ID NO: 234 - RNA, 23 nt, synthetic construct
  source 1..23: mol_type = other RNA; note = Description of Artificial Sequence: Synthetic oligonucleotide
  modified_base 1: mod_base = OTHER; note = 2'-O-methyladenosine-3'-phosphorothioate
  modified_base 2: mod_base = OTHER; note = 2'-fluoroadenosine-3'-phosphorothioate
  modified_base 3: mod_base = OTHER; note = 2'-O-methylguanosine-3'-phosphate
  modified_base 4: mod_base = OTHER; note = 2'-fluorocytidine-3'-phosphate
  modified_base 5: mod_base = OTHER; note = 2'-O-methyladenosine-3'-phosphate
  modified_base 6: mod_base = OTHER; note = 2'-fluoroadenosine-3'-phosphate
  modified_base 7: mod_base = OTHER; note = 2'-O-methyladenosine-3'-phosphate
  modified_base 8: mod_base = OTHER; note = 2'-fluoroadenosine-3'-phosphate
  modified_base 9: mod_base = OTHER; note = 2'-O-methylcytidine-3'-phosphate
  modified_base 10: mod_base = OTHER; note = 2'-fluoroadenosine-3'-phosphate
  modified_base 11: mod_base = OTHER; note = 2'-O-methylguanosine-3'-phosphate
  modified_base 12: mod_base = OTHER; note = 2'-O-methylguanosine-3'-phosphate
  modified_base 13: mod_base = OTHER; note = 2'-O-methyluridine-3'-phosphate
  modified_base 14: mod_base = OTHER; note = 2'-fluorocytidine-3'-phosphate
  modified_base 15: mod_base = OTHER; note = 2'-O-methyluridine-3'-phosphate
  modified_base 16: mod_base = OTHER; note = 2'-fluoroadenosine-3'-phosphate
  modified_base 17: mod_base = OTHER; note = 2'-O-methylguanosine-3'-phosphate
  modified_base 18: mod_base = OTHER; note = 2'-fluoroadenosine-3'-phosphate
  modified_base 19: mod_base = OTHER; note = 2'-O-methyladenosine-3'-phosphate
  modified_base 20: mod_base = OTHER; note = 2'-fluoroadenosine-3'-phosphate
  modified_base 21: mod_base = OTHER; note = 2'-O-methyladenosine-3'-phosphorothioate
  modified_base 22: mod_base = OTHER; note = 2'-O-methylguanosine-3'-phosphorothioate
  modified_base 23: mod_base = OTHER; note = 2'-O-methyluridine-3'-phosphate
aagcaaaacaggtctagaaaagt

SEQ ID NO: 235 - RNA, 21 nt, synthetic construct
  source 1..21: mol_type = other RNA; note = Description of Artificial Sequence: Synthetic oligonucleotide
  modified_base 1: mod_base = OTHER; note = 2'-fluorouridine-3'-phosphate
  modified_base 2: mod_base = OTHER; note = 2'-O-methyluridine-3'-phosphate
  modified_base 3: mod_base = OTHER; note = 2'-fluorouridine-3'-phosphate
  modified_base 4: mod_base = OTHER; note = 2'-O-methylcytidine-3'-phosphate
  modified_base 5: mod_base = OTHER; note = 2'-fluorouridine-3'-phosphate
  modified_base 6: mod_base = OTHER; note = 2'-O-methyladenosine-3'-phosphate
  modified_base 7: mod_base = OTHER; note = 2'-fluoroguanosine-3'-phosphate
  modified_base 8: mod_base = OTHER; note = 2'-O-methyladenosine-3'-phosphate
  modified_base 9: mod_base = OTHER; note = 2'-fluorocytidine-3'-phosphate
  modified_base 10: mod_base = OTHER; note = 2'-fluorocytidine-3'-phosphate
  modified_base 11: mod_base = OTHER; note = 2'-fluorouridine-3'-phosphate
  modified_base 12: mod_base = OTHER; note = 2'-O-methylguanosine-3'-phosphate
  modified_base 13: mod_base = OTHER; note = 2'-fluorouridine-3'-phosphate
  modified_base 14: mod_base = OTHER; note = 2'-O-methyluridine-3'-phosphate
  modified_base 15: mod_base = OTHER; note = 2'-fluorouridine-3'-phosphate
  modified_base 16: mod_base = OTHER; note = 2'-O-methyluridine-3'-phosphate
  modified_base 17: mod_base = OTHER; note = 2'-fluoroguanosine-3'-phosphate
  modified_base 18: mod_base = OTHER; note = 2'-O-methylcytidine-3'-phosphate
  modified_base 19: mod_base = OTHER; note = 2'-fluorouridine-3'-phosphate
  modified_base 20: mod_base = OTHER; note = 2'-O-methyluridine-3'-phosphate
  modified_base 21: mod_base = OTHER; note = 2'-fluorouridine-3'-phosphate N-[tris(GalNAc-alkyl)-amidodecanoyl)]-4-hydroxyprolinol Hyp-(GalNAc-alkyl)3
tttctagacctgttttgcttt

SEQ ID NO: 236 - RNA, 23 nt, synthetic construct
  source 1..23: mol_type = other RNA; note = Description of Artificial Sequence: Synthetic oligonucleotide
  modified_base 1: mod_base = OTHER; note = 2'-O-methyladenosine-3'-phosphate
  modified_base 2: mod_base = OTHER; note = 2'-fluoroadenosine-3'-phosphate
  modified_base 3: mod_base = OTHER; note = 2'-O-methyladenosine-3'-phosphate
  modified_base 4: mod_base = OTHER; note = 2'-fluoroguanosine-3'-phosphate
  modified_base 5: mod_base = OTHER; note = 2'-O-methylcytidine-3'-phosphate
  modified_base 6: mod_base = OTHER; note = 2'-fluoroadenosine-3'-phosphate
  modified_base 7: mod_base = OTHER; note = 2'-O-methyladenosine-3'-phosphate
  modified_base 8: mod_base = OTHER; note = 2'-fluoroadenosine-3'-phosphate
  modified_base 9: mod_base = OTHER; note = 2'-O-methyladenosine-3'-phosphate
  modified_base 10: mod_base = OTHER; note = 2'-fluorocytidine-3'-phosphate
  modified_base 11: mod_base = OTHER; note = 2'-O-methyladenosine-3'-phosphate
  modified_base 12: mod_base = OTHER; note = 2'-O-methylguanosine-3'-phosphate
  modified_base 13: mod_base = OTHER; note = 2'-O-methylguanosine-3'-phosphate
  modified_base 14: mod_base = OTHER; note = 2'-fluorouridine-3'-phosphate
  modified_base 15: mod_base = OTHER; note = 2'-O-methylcytidine-3'-phosphate
  modified_base 16: mod_base = OTHER; note = 2'-fluorouridine-3'-phosphate
  modified_base 17: mod_base = OTHER; note = 2'-O-methyladenosine-3'-phosphate
  modified_base 18: mod_base = OTHER; note = 2'-fluoroguanosine-3'-phosphate
  modified_base 19: mod_base = OTHER; note = 2'-O-methyladenosine-3'-phosphate
  modified_base 20: mod_base = OTHER; note = 2'-fluoroadenosine-3'-phosphate
  modified_base 21: mod_base = OTHER; note = 2'-O-methyladenosine-3'-phosphorothioate
  modified_base 22: mod_base = OTHER; note = 2'-fluoroadenosine-3'-phosphorothioate
  modified_base 23: mod_base = OTHER; note = 2'-O-methylguanosine-3'-phosphate
aaagcaaaacaggtctagaaaag

SEQ ID NO: 237 - RNA, 21 nt, synthetic construct
  source 1..21: mol_type = other RNA; note = Description of Artificial Sequence: Synthetic oligonucleotide
  modified_base 1: mod_base = OTHER; note = 2'-fluorocytidine-3'-phosphorothioate
  modified_base 2: mod_base = OTHER; note = 2'-O-methyluridine-3'-phosphorothioate
  modified_base 3: mod_base = OTHER; note = 2'-fluoroadenosine-3'-phosphate
  modified_base 4: mod_base = OTHER; note = 2'-O-methylguanosine-3'-phosphate
  modified_base 5: mod_base = OTHER; note = 2'-fluoroadenosine-3'-phosphate
  modified_base 6: mod_base = OTHER; note = 2'-O-methylcytidine-3'-phosphate
  modified_base 7: mod_base = OTHER; note = 2'-fluorocytidine-3'-phosphate
  modified_base 8: mod_base = OTHER; note = 2'-O-methyluridine-3'-phosphate
  modified_base 9: mod_base = OTHER; note = 2'-fluoroguanosine-3'-phosphate
  modified_base 10: mod_base = OTHER; note = 2'-fluorouridine-3'-phosphate
  modified_base 11: mod_base = OTHER; note = 2'-fluorouridine-3'-phosphate
  modified_base 12: mod_base = OTHER; note = 2'-O-methyluridine-3'-phosphate
  modified_base 13: mod_base = OTHER; note = 2'-fluorouridine-3'-phosphate
  modified_base 14: mod_base = OTHER; note = 2'-O-methylguanosine-3'-phosphate
  modified_base 15: mod_base = OTHER; note = 2'-fluorocytidine-3'-phosphate
  modified_base 16: mod_base = OTHER; note = 2'-O-methyluridine-3'-phosphate
  modified_base 17: mod_base = OTHER; note = 2'-fluorouridine-3'-phosphate
  modified_base 18: mod_base = OTHER; note = 2'-O-methyluridine-3'-phosphate
  modified_base 19: mod_base = OTHER; note = 2'-fluorouridine-3'-phosphate
  modified_base 20: mod_base = OTHER; note = 2'-O-methylguanosine-3'-phosphate
  modified_base 21: mod_base = OTHER; note = 2'-fluorouridine-3'-phosphate N-[tris(GalNAc-alkyl)-amidodecanoyl)]-4-hydroxyprolinol Hyp-(GalNAc-alkyl)3
ctagacctgttttgcttttgt

SEQ ID NO: 238 - RNA, 23 nt, synthetic construct
  source 1..23: mol_type = other RNA; note = Description of Artificial Sequence: Synthetic oligonucleotide
  modified_base 1: mod_base = OTHER; note = 5'-phosphate-2'-O-methyladenosine-3'-phosphorothioate
  modified_base 2: mod_base = OTHER; note = 2'-fluorocytidine-3'-phosphorothioate
  modified_base 3: mod_base = OTHER; note = 2'-O-methyladenosine-3'-phosphate
  modified_base 4: mod_base = OTHER; note = 2'-fluoroadenosine-3'-phosphate
  modified_base 5: mod_base = OTHER; note = 2'-O-methyladenosine-3'-phosphate
  modified_base 6: mod_base = OTHER; note = 2'-fluoroadenosine-3'-phosphate
  modified_base 7: mod_base = OTHER; note = 2'-O-methylguanosine-3'-phosphate
  modified_base 8: mod_base = OTHER; note = 2'-fluorocytidine-3'-phosphate
  modified_base 9: mod_base = OTHER; note = 2'-O-methyladenosine-3'-phosphate
  modified_base 10: mod_base = OTHER; note = 2'-fluoroadenosine-3'-phosphate
  modified_base 11: mod_base = OTHER; note = 2'-O-methyladenosine-3'-phosphate
  modified_base 12: mod_base = OTHER; note = 2'-O-methyladenosine-3'-phosphate
  modified_base 13: mod_base = OTHER; note = 2'-O-methylcytidine-3'-phosphate
  modified_base 14: mod_base = OTHER; note = 2'-fluoroadenosine-3'-phosphate
  modified_base 15: mod_base = OTHER; note = 2'-O-methylguanosine-3'-phosphate
  modified_base 16: mod_base = OTHER; note = 2'-fluoroguanosine-3'-phosphate
  modified_base 17: mod_base = OTHER; note = 2'-O-methyluridine-3'-phosphate
  modified_base 18: mod_base = OTHER; note = 2'-fluorocytidine-3'-phosphate
  modified_base 19: mod_base = OTHER; note = 2'-O-methyluridine-3'-phosphate
  modified_base 20: mod_base = OTHER; note = 2'-fluoroadenosine-3'-phosphate
  modified_base 21: mod_base = OTHER; note = 2'-O-methylguanosine-3'-phosphorothioate
  modified_base 22: mod_base = OTHER; note = 2'-O-methyladenosine-3'-phosphorothioate
  modified_base 23: mod_base = OTHER; note = 2'-O-methyladenosine-3'-phosphate
acaaaagcaaaacaggtctagaa

SEQ ID NO: 239 - RNA, 21 nt, synthetic construct
  source 1..21: mol_type = other RNA; note = Description of Artificial Sequence: Synthetic oligonucleotide
  modified_base 1: mod_base = OTHER; note = 2'-fluorocytidine-3'-phosphorothioate
  modified_base 2: mod_base = OTHER; note = 2'-O-methyluridine-3'-phosphorothioate
  modified_base 3: mod_base = OTHER; note = 2'-fluoroadenosine-3'-phosphate
  modified_base 4: mod_base = OTHER; note = 2'-O-methylguanosine-3'-phosphate
  modified_base 5: mod_base = OTHER; note = 2'-fluoroadenosine-3'-phosphate
  modified_base 6: mod_base = OTHER; note = 2'-O-methylcytidine-3'-phosphate
  modified_base 7: mod_base = OTHER; note = 2'-fluorocytidine-3'-phosphate
  modified_base 8: mod_base = OTHER; note = 2'-O-methyluridine-3'-phosphate
  modified_base 9: mod_base = OTHER; note = 2'-fluoroguanosine-3'-phosphate
  modified_base 10: mod_base = OTHER; note = 2'-fluorouridine-3'-phosphate
  modified_base 11: mod_base = OTHER; note = 2'-fluorouridine-3'-phosphate
  modified_base 12: mod_base = OTHER; note = 2'-O-methyluridine-3'-phosphate
  modified_base 13: mod_base = OTHER; note = 2'-fluorouridine-3'-phosphate
  modified_base 14: mod_base = OTHER; note = 2'-O-methylguanosine-3'-phosphate
  modified_base 15: mod_base = OTHER; note = 2'-fluorocytidine-3'-phosphate
  modified_base 16: mod_base = OTHER; note = 2'-O-methyluridine-3'-phosphate
  modified_base 17: mod_base = OTHER; note = 2'-fluorouridine-3'-phosphate
  modified_base 18: mod_base = OTHER; note = 2'-O-methyluridine-3'-phosphate
  modified_base 19: mod_base = OTHER; note = 2'-fluorouridine-3'-phosphate
  modified_base 20: mod_base = OTHER; note = 2'-O-methylguanosine-3'-phosphate
  modified_base 21: mod_base = OTHER; note = 2'-fluorouridine-3'-phosphate N-[tris(GalNAc-alkyl)-amidodecanoyl)]-4-hydroxyprolinol Hyp-(GalNAc-alkyl)3
ctagacctgttttgcttttgt

SEQ ID NO: 240 - RNA, 23 nt, synthetic construct
  source 1..23: mol_type = other RNA; note = Description of Artificial Sequence: Synthetic oligonucleotide
  modified_base 1: mod_base = OTHER; note = 5'-phosphate-2'-O-methyladenosine-3'-phosphorothioate
  modified_base 2: mod_base = OTHER; note = 2'-fluorocytidine-3'-phosphorothioate
  modified_base 3: mod_base = OTHER; note = 2'-O-methyladenosine-3'-phosphate
  modified_base 4: mod_base = OTHER; note = 2'-fluoroadenosine-3'-phosphate
  modified_base 5: mod_base = OTHER; note = 2'-O-methyladenosine-3'-phosphate
  modified_base 6: mod_base = OTHER; note = 2'-fluoroadenosine-3'-phosphorothioate
  modified_base 7: mod_base = OTHER; note = 2'-O-methylguanosine-3'-phosphate
  modified_base 8: mod_base = OTHER; note = 2'-fluorocytidine-3'-phosphate
  modified_base 9: mod_base = OTHER; note = 2'-O-methyladenosine-3'-phosphate
  modified_base 10: mod_base = OTHER; note = 2'-fluoroadenosine-3'-phosphate
  modified_base 11: mod_base = OTHER; note = 2'-O-methyladenosine-3'-phosphate
  modified_base 12: mod_base = OTHER; note = 2'-O-methyladenosine-3'-phosphate
  modified_base 13: mod_base = OTHER; note = 2'-O-methylcytidine-3'-phosphate
  modified_base 14: mod_base = OTHER; note = 2'-fluoroadenosine-3'-phosphate
  modified_base 15: mod_base = OTHER; note = 2'-O-methylguanosine-3'-phosphate
  modified_base 16: mod_base = OTHER; note = 2'-fluoroguanosine-3'-phosphate
  modified_base 17: mod_base = OTHER; note = 2'-O-methyluridine-3'-phosphate
  modified_base 18: mod_base = OTHER; note = 2'-fluorocytidine-3'-phosphorothioate
  modified_base 19: mod_base = OTHER; note = 2'-O-methyluridine-3'-phosphate
  modified_base 20: mod_base = OTHER; note = 2'-fluoroadenosine-3'-phosphate
  modified_base 21: mod_base = OTHER; note = 2'-O-methylguanosine-3'-phosphorothioate
  modified_base 22: mod_base = OTHER; note = 2'-O-methyladenosine-3'-phosphorothioate
  modified_base 23: mod_base = OTHER; note = 2'-O-methyladenosine-3'-phosphate
acaaaagcaaaacaggtctagaa

SEQ ID NO: 241 - RNA, 21 nt, synthetic construct
  source 1..21: mol_type = other RNA; note = Description of Artificial Sequence: Synthetic oligonucleotide
  modified_base 1: mod_base = OTHER; note = 2'-fluorouridine-3'-phosphate
  modified_base 2: mod_base = OTHER; note = 2'-O-methyluridine-3'-phosphate
  modified_base 3: mod_base = OTHER; note = 2'-fluorocytidine-3'-phosphate
  modified_base 4: mod_base = OTHER; note = 2'-O-methyluridine-3'-phosphate
  modified_base 5: mod_base = OTHER; note = 2'-fluoroadenosine-3'-phosphate
  modified_base 6: mod_base = OTHER; note = 2'-O-methylguanosine-3'-phosphate
  modified_base 7: mod_base = OTHER; note = 2'-fluoroadenosine-3'-phosphate
  modified_base 8: mod_base = OTHER; note = 2'-O-methylcytidine-3'-phosphate
  modified_base 9: mod_base = OTHER; note = 2'-fluorocytidine-3'-phosphate
  modified_base 10: mod_base = OTHER; note = 2'-fluorouridine-3'-phosphate
  modified_base 11: mod_base = OTHER; note = 2'-fluoroguanosine-3'-phosphate
  modified_base 12: mod_base = OTHER; note = 2'-O-methyluridine-3'-phosphate
  modified_base 13: mod_base = OTHER; note = 2'-fluorouridine-3'-phosphate
  modified_base 14: mod_base = OTHER; note = 2'-O-methyluridine-3'-phosphate
  modified_base 15: mod_base = OTHER; note = 2'-fluorouridine-3'-phosphate
  modified_base 16: mod_base = OTHER; note = 2'-O-methylguanosine-3'-phosphate
  modified_base 17: mod_base = OTHER; note = 2'-fluorocytidine-3'-phosphate
  modified_base 18: mod_base = OTHER; note = 2'-O-methyluridine-3'-phosphate
  modified_base 19: mod_base = OTHER; note = 2'-fluorouridine-3'-phosphate
  modified_base 20: mod_base = OTHER; note = 2'-O-methyluridine-3'-phosphate
  modified_base 21: mod_base = OTHER; note = 2'-fluorouridine-3'-phosphate N-[tris(GalNAc-alkyl)-amidodecanoyl)]-4-hydroxyprolinol Hyp-(GalNAc-alkyl)3
ttctagacctgttttgctttt

SEQ ID NO: 242 - RNA, 23 nt, synthetic construct
  source 1..23: mol_type = other RNA; note = Description of Artificial Sequence: Synthetic oligonucleotide
  modified_base 1: mod_base = OTHER; note = 2'-O-methyladenosine-3'-phosphate
  modified_base 2: mod_base = OTHER; note = 2'-fluoroadenosine-3'-phosphate
  modified_base 3: mod_base = OTHER; note = 2'-O-methyladenosine-3'-phosphate
  modified_base 4: mod_base = OTHER; note = 2'-fluoroadenosine-3'-phosphate
  modified_base 5: mod_base = OTHER; note = 2'-O-methylguanosine-3'-phosphate
  modified_base 6: mod_base = OTHER; note = 2'-fluorocytidine-3'-phosphate
  modified_base 7: mod_base = OTHER; note = 2'-O-methyladenosine-3'-phosphate
  modified_base 8: mod_base = OTHER; note = 2'-fluoroadenosine-3'-phosphate
  modified_base 9: mod_base = OTHER; note = 2'-O-methyladenosine-3'-phosphate
  modified_base 10: mod_base = OTHER; note = 2'-fluoroadenosine-3'-phosphate
  modified_base 11: mod_base = OTHER; note = 2'-O-methylcytidine-3'-phosphate
  modified_base 12: mod_base = OTHER; note = 2'-O-methyladenosine-3'-phosphate
  modified_base 13: mod_base = OTHER; note = 2'-O-methylguanosine-3'-phosphate
  modified_base 14: mod_base = OTHER; note = 2'-fluoroguanosine-3'-phosphate
  modified_base 15: mod_base = OTHER; note = 2'-O-methyluridine-3'-phosphate
  modified_base 16: mod_base = OTHER; note = 2'-fluorocytidine-3'-phosphate
  modified_base 17: mod_base = OTHER; note = 2'-O-methyluridine-3'-phosphate
  modified_base 18: mod_base = OTHER; note = 2'-fluoroadenosine-3'-phosphate
  modified_base 19: mod_base = OTHER; note = 2'-O-methylguanosine-3'-phosphate
  modified_base 20: mod_base = OTHER; note = 2'-fluoroadenosine-3'-phosphate
  modified_base 21: mod_base = OTHER; note = 2'-O-methyladenosine-3'-phosphorothioate
  modified_base 22: mod_base = OTHER; note = 2'-fluoroadenosine-3'-phosphorothioate
  modified_base 23: mod_base = OTHER; note = 2'-O-methyladenosine-3'-phosphate
aaaagcaaaacaggtctagaaaa

SEQ ID NO: 243 - RNA, 21 nt, synthetic construct
  source 1..21: mol_type = other RNA; note = Description of Artificial Sequence: Synthetic oligonucleotide
  modified_base 1: mod_base = OTHER; note = 2'-fluorocytidine-3'-phosphate
  modified_base 2: mod_base = OTHER; note = 2'-O-methyluridine-3'-phosphate
  modified_base 3: mod_base = OTHER; note = 2'-fluoroadenosine-3'-phosphate
  modified_base 4: mod_base = OTHER; note = 2'-O-methylguanosine-3'-phosphate
  modified_base 5: mod_base = OTHER; note = 2'-fluoroadenosine-3'-phosphate
  modified_base 6: mod_base = OTHER; note = 2'-O-methylcytidine-3'-phosphate
  modified_base 7: mod_base = OTHER; note = 2'-fluorocytidine-3'-phosphate
  modified_base 8: mod_base = OTHER; note = 2'-O-methyluridine-3'-phosphate
  modified_base 9: mod_base = OTHER; note = 2'-fluoroguanosine-3'-phosphate
  modified_base 10: mod_base = OTHER; note = 2'-fluorouridine-3'-phosphate
  modified_base 11: mod_base = OTHER; note = 2'-fluorouridine-3'-phosphate
  modified_base 12: mod_base = OTHER; note = 2'-O-methyluridine-3'-phosphate
  modified_base 13: mod_base = OTHER; note = 2'-fluorouridine-3'-phosphate
  modified_base 14: mod_base = OTHER; note = 2'-O-methylguanosine-3'-phosphate
  modified_base 15: mod_base = OTHER; note = 2'-fluorocytidine-3'-phosphate
  modified_base 16: mod_base = OTHER; note = 2'-O-methyluridine-3'-phosphate
  modified_base 17: mod_base = OTHER; note = 2'-fluorouridine-3'-phosphate
  modified_base 18: mod_base = OTHER; note = 2'-O-methyluridine-3'-phosphate
  modified_base 19: mod_base = OTHER; note = 2'-fluorouridine-3'-phosphate
  modified_base 20: mod_base = OTHER; note = 2'-O-methylguanosine-3'-phosphate
  modified_base 21: mod_base = OTHER; note = 2'-fluorouridine-3'-phosphate N-[tris(GalNAc-alkyl)-amidodecanoyl)]-4-hydroxyprolinol Hyp-(GalNAc-alkyl)3
ctagacctgttttgcttttgt

SEQ ID NO: 244 - RNA, 23 nt, synthetic construct
  source 1..23: mol_type = other RNA; note = Description of Artificial Sequence: Synthetic oligonucleotide
  modified_base 1: mod_base = OTHER; note = 2'-O-methyladenosine-3'-phosphate
  modified_base 2: mod_base = OTHER; note = 2'-fluorocytidine-3'-phosphate
  modified_base 3: mod_base = OTHER; note = 2'-O-methyladenosine-3'-phosphate
  modified_base 4: mod_base = OTHER; note = 2'-fluoroadenosine-3'-phosphate
  modified_base 5: mod_base = OTHER; note = 2'-O-methyladenosine-3'-phosphate
  modified_base 6: mod_base = OTHER; note = 2'-fluoroadenosine-3'-phosphate
  modified_base 7: mod_base = OTHER; note = 2'-O-methylguanosine-3'-phosphate
  modified_base 8: mod_base = OTHER; note = 2'-fluorocytidine-3'-phosphate
  modified_base 9: mod_base = OTHER; note = 2'-O-methyladenosine-3'-phosphate
  modified_base 10: mod_base = OTHER; note = 2'-fluoroadenosine-3'-phosphate
  modified_base 11: mod_base = OTHER; note = 2'-O-methyladenosine-3'-phosphate
  modified_base 12: mod_base = OTHER; note = 2'-O-methyladenosine-3'-phosphate
  modified_base 13: mod_base = OTHER; note = 2'-O-methylcytidine-3'-phosphate
  modified_base 14: mod_base = OTHER; note = 2'-fluoroadenosine-3'-phosphate
  modified_base 15: mod_base = OTHER; note = 2'-O-methylguanosine-3'-phosphate
  modified_base 16: mod_base = OTHER; note = 2'-fluoroguanosine-3'-phosphate
  modified_base 17: mod_base = OTHER; note = 2'-O-methyluridine-3'-phosphate
  modified_base 18: mod_base = OTHER; note = 2'-fluorocytidine-3'-phosphate
  modified_base 19: mod_base = OTHER; note = 2'-O-methyluridine-3'-phosphate
  modified_base 20: mod_base = OTHER; note = 2'-fluoroadenosine-3'-phosphate
  modified_base 21: mod_base = OTHER; note = 2'-O-methylguanosine-3'-phosphorothioate
  modified_base 22: mod_base = OTHER; note = 2'-fluoroadenosine-3'-phosphorothioate
  modified_base 23: mod_base = OTHER; note = 2'-O-methyladenosine-3'-phosphate
acaaaagcaaaacaggtctagaa

SEQ ID NO: 245 - RNA, 21 nt, synthetic construct
  source 1..21: mol_type = other RNA; note = Description of Artificial Sequence: Synthetic oligonucleotide
  modified_base 1: mod_base = OTHER; note = 2'-fluorocytidine-3'-phosphorothioate
  modified_base 2: mod_base = OTHER; note = 2'-O-methyluridine-3'-phosphorothioate
  modified_base 3: mod_base = OTHER; note = 2'-fluoroadenosine-3'-phosphate
  modified_base 4: mod_base = OTHER; note = 2'-O-methylguanosine-3'-phosphate
  modified_base 5: mod_base = OTHER; note = 2'-fluoroadenosine-3'-phosphate
  modified_base 6: mod_base = OTHER; note = 2'-O-methylcytidine-3'-phosphate
  modified_base 7: mod_base = OTHER; note = 2'-fluorocytidine-3'-phosphate
  modified_base 8: mod_base = OTHER; note = 2'-O-methyluridine-3'-phosphate
  modified_base 9: mod_base = OTHER; note = 2'-fluoroguanosine-3'-phosphate
  modified_base 10: mod_base = OTHER; note = 2'-fluorouridine-3'-phosphate
  modified_base 11: mod_base = OTHER; note = 2'-fluorouridine-3'-phosphate
  modified_base 12: mod_base = OTHER; note = 2'-O-methyluridine-3'-phosphate
  modified_base 13: mod_base = OTHER; note = 2'-fluorouridine-3'-phosphate
  modified_base 14: mod_base = OTHER; note = 2'-O-methylguanosine-3'-phosphate
  modified_base 15: mod_base = OTHER; note = 2'-fluorocytidine-3'-phosphate
  modified_base 16: mod_base = OTHER; note = 2'-O-methyluridine-3'-phosphate
  modified_base 17: mod_base = OTHER; note = 2'-fluorouridine-3'-phosphate
  modified_base 18: mod_base = OTHER; note = 2'-O-methyluridine-3'-phosphate
  modified_base 19: mod_base = OTHER; note = 2'-fluorouridine-3'-phosphate
  modified_base 20: mod_base = OTHER; note = 2'-O-methylguanosine-3'-phosphate
  modified_base 21: mod_base = OTHER; note = 2'-fluorouridine-3'-phosphate N-[tris(GalNAc-alkyl)-amidodecanoyl)]-4-hydroxyprolinol Hyp-(GalNAc-alkyl)3
ctagacctgttttgcttttgt

SEQ ID NO: 246 - RNA, 23 nt, synthetic construct
  source 1..23: mol_type = other RNA; note = Description of Artificial Sequence: Synthetic oligonucleotide
  modified_base 1: mod_base = OTHER; note = 2'-O-methyladenosine-3'-phosphorothioate
  modified_base 2: mod_base = OTHER; note = 2'-fluorocytidine-3'-phosphorothioate
  modified_base 3: mod_base = OTHER; note = 2'-O-methyladenosine-3'-phosphate
  modified_base 4: mod_base = OTHER; note = 2'-fluoroadenosine-3'-phosphate
  modified_base 5: mod_base = OTHER; note = 2'-O-methyladenosine-3'-phosphate
  modified_base 6: mod_base = OTHER; note = 2'-fluoroadenosine-3'-phosphate
  modified_base 7: mod_base = OTHER; note = 2'-O-methylguanosine-3'-phosphate
  modified_base 8: mod_base = OTHER; note = 2'-fluorocytidine-3'-phosphate
  modified_base 9: mod_base = OTHER; note = 2'-O-methyladenosine-3'-phosphate
  modified_base 10: mod_base = OTHER; note = 2'-fluoroadenosine-3'-phosphate
  modified_base 11: mod_base = OTHER; note = 2'-O-methyladenosine-3'-phosphate
  modified_base 12: mod_base = OTHER; note = 2'-O-methyladenosine-3'-phosphate
  modified_base 13: mod_base = OTHER; note = 2'-O-methylcytidine-3'-phosphate
  modified_base 14: mod_base = OTHER; note = 2'-fluoroadenosine-3'-phosphate
  modified_base 15: mod_base = OTHER; note = 2'-O-methylguanosine-3'-phosphate
  modified_base 16: mod_base = OTHER; note = 2'-fluoroguanosine-3'-phosphate
  modified_base 17: mod_base = OTHER; note = 2'-O-methyluridine-3'-phosphate
  modified_base 18: mod_base = OTHER; note = 2'-fluorocytidine-3'-phosphate
  modified_base 19: mod_base = OTHER; note = 2'-O-methyluridine-3'-phosphate
  modified_base 20: mod_base = OTHER; note = 2'-fluoroadenosine-3'-phosphate
  modified_base 21: mod_base = OTHER; note = 2'-O-methylguanosine-3'-phosphorothioate
  modified_base 22: mod_base = OTHER; note = 2'-O-methyladenosine-3'-phosphorothioate
  modified_base 23: mod_base = OTHER; note = 2'-O-methyladenosine-3'-phosphate
acaaaagcaaaacaggtctagaa

SEQ ID NO: 247 - RNA, 21 nt, synthetic construct
  source 1..21: mol_type = other RNA; note = Description of Artificial Sequence: Synthetic oligonucleotide
  modified_base 1: mod_base = OTHER; note = 2'-fluorocytidine-3'-phosphorothioate
  modified_base 2: mod_base = OTHER; note = 2'-O-methyluridine-3'-phosphorothioate
  modified_base 3: mod_base = OTHER; note = 2'-fluoroadenosine-3'-phosphate
  modified_base 4: mod_base = OTHER; note = 2'-O-methylguanosine-3'-phosphate
  modified_base 5: mod_base = OTHER; note = 2'-fluoroadenosine-3'-phosphate
  modified_base 6: mod_base = OTHER; note = 2'-O-methylcytidine-3'-phosphate
  modified_base 7: mod_base = OTHER; note = 2'-fluorocytidine-3'-phosphate
  modified_base 8: mod_base = OTHER; note = 2'-O-methyluridine-3'-phosphate
  modified_base 9: mod_base = OTHER; note = 2'-fluoroguanosine-3'-phosphate
  modified_base 10: mod_base = OTHER; note = 2'-fluorouridine-3'-phosphate
  modified_base 11: mod_base = OTHER; note = 2'-fluorouridine-3'-phosphate
  modified_base 12: mod_base = OTHER; note = 2'-O-methyluridine-3'-phosphate
  modified_base 13: mod_base = OTHER; note = 2'-O-methyluridine-3'-phosphate
  modified_base 14: mod_base = OTHER; note = 2'-O-methylguanosine-3'-phosphate
  modified_base 15: mod_base = OTHER; note = 2'-fluorocytidine-3'-phosphate
  modified_base 16: mod_base = OTHER; note = 2'-O-methyluridine-3'-phosphate
  modified_base 17: mod_base = OTHER; note = 2'-O-methyluridine-3'-phosphate
  modified_base 18: mod_base = OTHER; note = 2'-O-methyluridine-3'-phosphate
  modified_base 19: mod_base = OTHER; note = 2'-O-methyluridine-3'-phosphate
  modified_base 20: mod_base = OTHER; note = 2'-O-methylguanosine-3'-phosphate
  modified_base 21: mod_base = OTHER; note = 2'-O-methyluridine-3'-phosphate N-[tris(GalNAc-alkyl)-amidodecanoyl)]-4-hydroxyprolinol Hyp-(GalNAc-alkyl)3
ctagacctgttttgcttttgt

SEQ ID NO: 248 - RNA, 23 nt, synthetic construct
  source 1..23: mol_type = other RNA; note = Description of Artificial Sequence: Synthetic oligonucleotide
  modified_base 1: mod_base = OTHER; note = 2'-O-methyladenosine-3'-phosphorothioate
  modified_base 2: mod_base = OTHER; note = 2'-fluorocytidine-3'-phosphorothioate
  modified_base 3: mod_base = OTHER; note = 2'-O-methyladenosine-3'-phosphate
  modified_base 4: mod_base = OTHER; note = 2'-fluoroadenosine-3'-phosphate
  modified_base 5: mod_base = OTHER; note = 2'-O-methyladenosine-3'-phosphate
  modified_base 6: mod_base = OTHER; note = 2'-fluoroadenosine-3'-phosphate
  modified_base 7: mod_base = OTHER; note = 2'-O-methylguanosine-3'-phosphate
  modified_base 8: mod_base = OTHER; note = 2'-fluorocytidine-3'-phosphate
  modified_base 9: mod_base = OTHER; note = 2'-O-methyladenosine-3'-phosphate
  modified_base 10: mod_base = OTHER; note = 2'-fluoroadenosine-3'-phosphate
  modified_base 11: mod_base = OTHER; note = 2'-O-methyladenosine-3'-phosphate
  modified_base 12: mod_base = OTHER; note = 2'-O-methyladenosine-3'-phosphate
  modified_base 13: mod_base = OTHER; note = 2'-O-methylcytidine-3'-phosphate
  modified_base 14: mod_base = OTHER; note = 2'-fluoroadenosine-3'-phosphate
  modified_base 15: mod_base = OTHER; note = 2'-O-methylguanosine-3'-phosphate
  modified_base 16: mod_base = OTHER; note = 2'-fluoroguanosine-3'-phosphate
  modified_base 17: mod_base = OTHER; note = 2'-O-methyluridine-3'-phosphate
  modified_base 18: mod_base = OTHER; note = 2'-fluorocytidine-3'-phosphate
  modified_base 19: mod_base = OTHER; note = 2'-O-methyluridine-3'-phosphate
  modified_base 20: mod_base = OTHER; note = 2'-fluoroadenosine-3'-phosphate
  modified_base 21: mod_base = OTHER; note = 2'-O-methylguanosine-3'-phosphorothioate
  modified_base 22: mod_base = OTHER; note = 2'-O-methyladenosine-3'-phosphorothioate
  modified_base 23: mod_base = OTHER; note = 2'-O-methyladenosine-3'-phosphate
acaaaagcaaaacaggtctagaa

SEQ ID NO: 249 - RNA, 21 nt, synthetic construct
  source 1..21: mol_type = other RNA; note = Description of Artificial Sequence: Synthetic oligonucleotide
  modified_base 1: mod_base = OTHER; note = 2'-fluorocytidine-3'-phosphorothioate
  modified_base 2: mod_base = OTHER; note = 2'-O-methyluridine-3'-phosphorothioate
  modified_base 3: mod_base = OTHER; note = 2'-fluoroadenosine-3'-phosphate
  modified_base 4: mod_base = OTHER; note = 2'-O-methylguanosine-3'-phosphate
  modified_base 5: mod_base = OTHER; note = 2'-fluoroadenosine-3'-phosphate
  modified_base 6: mod_base = OTHER; note = 2'-O-methylcytidine-3'-phosphate
  modified_base 7: mod_base = OTHER; note = 2'-fluorocytidine-3'-phosphate
  modified_base 8: mod_base = OTHER; note = 2'-O-methyluridine-3'-phosphate
  modified_base 9: mod_base = OTHER; note = 2'-fluoroguanosine-3'-phosphate
  modified_base 10: mod_base = OTHER; note = 2'-O-methyluridine-3'-phosphate
  modified_base 11: mod_base = OTHER; note = 2'-fluorouridine-3'-phosphate
  modified_base 12: mod_base = OTHER; note = 2'-O-methyluridine-3'-phosphate
  modified_base 13: mod_base = OTHER; note = 2'-O-methyluridine-3'-phosphate
  modified_base 14: mod_base = OTHER; note = 2'-O-methylguanosine-3'-phosphate
  modified_base 15: mod_base = OTHER; note = 2'-fluorocytidine-3'-phosphate
  modified_base 16: mod_base = OTHER; note = 2'-O-methyluridine-3'-phosphate
  modified_base 17: mod_base = OTHER; note = 2'-O-methyluridine-3'-phosphate
  modified_base 18: mod_base = OTHER; note = 2'-O-methyluridine-3'-phosphate
  modified_base 19: mod_base = OTHER; note = 2'-O-methyluridine-3'-phosphate
  modified_base 20: mod_base = OTHER; note = 2'-O-methylguanosine-3'-phosphate
  modified_base 21: mod_base = OTHER; note = 2'-O-methyluridine-3'-phosphate N-[tris(GalNAc-alkyl)-amidodecanoyl)]-4-hydroxyprolinol Hyp-(GalNAc-alkyl)3
ctagacctgttttgcttttgt

SEQ ID NO: 250 - RNA, 23 nt, synthetic construct
  source 1..23: mol_type = other RNA; note = Description of Artificial Sequence: Synthetic oligonucleotide
  modified_base 1: mod_base = OTHER; note = 2'-O-methyladenosine-3'-phosphorothioate
  modified_base 2: mod_base = OTHER; note = 2'-fluorocytidine-3'-phosphorothioate
  modified_base 3: mod_base = OTHER; note = 2'-O-methyladenosine-3'-phosphate
  modified_base 4: mod_base = OTHER; note = 2'-fluoroadenosine-3'-phosphate
  modified_base 5: mod_base = OTHER; note = 2'-O-methyladenosine-3'-phosphate
  modified_base 6: mod_base = OTHER; note = 2'-fluoroadenosine-3'-phosphate
  modified_base 7: mod_base = OTHER; note = 2'-O-methylguanosine-3'-phosphate
  modified_base 8: mod_base = OTHER; note = 2'-fluorocytidine-3'-phosphate
  modified_base 9: mod_base = OTHER; note = 2'-O-methyladenosine-3'-phosphate
  modified_base 10: mod_base = OTHER; note = 2'-fluoroadenosine-3'-phosphate
  modified_base 11: mod_base = OTHER; note = 2'-O-methyladenosine-3'-phosphate
  modified_base 12: mod_base = OTHER; note = 2'-O-methyladenosine-3'-phosphate
  modified_base 13: mod_base = OTHER; note = 2'-O-methylcytidine-3'-phosphate
  modified_base 14: mod_base = OTHER; note = 2'-fluoroadenosine-3'-phosphate
  modified_base 15: mod_base = OTHER; note = 2'-O-methylguanosine-3'-phosphate
  modified_base 16: mod_base = OTHER; note = 2'-fluoroguanosine-3'-phosphate
  modified_base 17: mod_base = OTHER; note = 2'-O-methyluridine-3'-phosphate
  modified_base 18: mod_base = OTHER; note = 2'-fluorocytidine-3'-phosphate
  modified_base 19: mod_base = OTHER; note = 2'-O-methyluridine-3'-phosphate
  modified_base 20: mod_base = OTHER; note = 2'-fluoroadenosine-3'-phosphate
  modified_base 21: mod_base = OTHER; note = 2'-O-methylguanosine-3'-phosphorothioate
  modified_base 22: mod_base = OTHER; note = 2'-O-methyladenosine-3'-phosphorothioate
  modified_base 23: mod_base = OTHER; note = 2'-O-methyladenosine-3'-phosphate
acaaaagcaaaacaggtctagaa

SEQ ID NO: 251 - RNA, 21 nt, synthetic construct
  source 1..21: mol_type = other RNA; note = Description of Artificial Sequence: Synthetic oligonucleotide
  modified_base 1: mod_base = OTHER; note = 2'-fluorocytidine-3'-phosphorothioate
  modified_base 2: mod_base = OTHER; note = 2'-O-methyluridine-3'-phosphorothioate
  modified_base 3: mod_base = OTHER; note = 2'-fluoroadenosine-3'-phosphate
  modified_base 4: mod_base = OTHER; note = 2'-O-methylguanosine-3'-phosphate
  modified_base 5: mod_base = OTHER; note = 2'-fluoroadenosine-3'-phosphate
  modified_base 6: mod_base = OTHER; note = 2'-O-methylcytidine-3'-phosphate
  modified_base 7: mod_base = OTHER; note = 2'-fluorocytidine-3'-phosphate
  modified_base 8: mod_base = OTHER; note = 2'-O-methyluridine-3'-phosphate
  modified_base 9: mod_base = OTHER; note = 2'-fluoroguanosine-3'-phosphate
  modified_base 10: mod_base = OTHER; note = 2'-fluorouridine-3'-phosphate
  modified_base 11: mod_base = OTHER; note = 2'-O-methyluridine-3'-phosphate
  modified_base 12: mod_base = OTHER; note = 2'-O-methyluridine-3'-phosphate
  modified_base 13: mod_base = OTHER; note = 2'-O-methyluridine-3'-phosphate
  modified_base 14: mod_base = OTHER; note = 2'-O-methylguanosine-3'-phosphate
  modified_base 15: mod_base = OTHER; note = 2'-fluorocytidine-3'-phosphate
  modified_base 16: mod_base = OTHER; note = 2'-O-methyluridine-3'-phosphate
  modified_base 17: mod_base = OTHER; note = 2'-O-methyluridine-3'-phosphate
  modified_base 18: mod_base = OTHER; note = 2'-O-methyluridine-3'-phosphate
  modified_base 19: mod_base = OTHER; note = 2'-O-methyluridine-3'-phosphate
  modified_base 20: mod_base = OTHER; note = 2'-O-methylguanosine-3'-phosphate
  modified_base 21: mod_base = OTHER; note = 2'-O-methyluridine-3'-phosphate N-[tris(GalNAc-alkyl)-amidodecanoyl)]-4-hydroxyprolinol Hyp-(GalNAc-alkyl)3
ctagacctgttttgcttttgt

SEQ ID NO: 252 - RNA, 23 nt, synthetic construct
  source 1..23: mol_type = other RNA; note = Description of Artificial Sequence: Synthetic oligonucleotide
  modified_base 1: mod_base = OTHER; note = 2'-O-methyladenosine-3'-phosphorothioate
  modified_base 2: mod_base = OTHER; note = 2'-fluorocytidine-3'-phosphorothioate
  modified_base 3: mod_base = OTHER; note = 2'-O-methyladenosine-3'-phosphate
  modified_base 4: mod_base = OTHER; note = 2'-fluoroadenosine-3'-phosphate
  modified_base 5: mod_base = OTHER; note = 2'-O-methyladenosine-3'-phosphate
  modified_base 6: mod_base = OTHER; note = 2'-fluoroadenosine-3'-phosphate
  modified_base 7: mod_base = OTHER; note = 2'-O-methylguanosine-3'-phosphate
  modified_base 8: mod_base = OTHER; note = 2'-fluorocytidine-3'-phosphate
  modified_base 9: mod_base = OTHER; note = 2'-O-methyladenosine-3'-phosphate
  modified_base 10: mod_base = OTHER; note = 2'-fluoroadenosine-3'-phosphate
  modified_base 11: mod_base = OTHER; note = 2'-O-methyladenosine-3'-phosphate
  modified_base 12: mod_base = OTHER; note = 2'-O-methyladenosine-3'-phosphate
  modified_base 13: mod_base = OTHER; note = 2'-O-methylcytidine-3'-phosphate
  modified_base 14: mod_base = OTHER; note = 2'-fluoroadenosine-3'-phosphate
  modified_base 15: mod_base = OTHER; note = 2'-O-methylguanosine-3'-phosphate
  modified_base 16: mod_base = OTHER; note = 2'-fluoroguanosine-3'-phosphate
  modified_base 17: mod_base = OTHER; note = 2'-O-methyluridine-3'-phosphate
  modified_base 18: mod_base = OTHER; note = 2'-fluorocytidine-3'-phosphate
  modified_base 19: mod_base = OTHER; note = 2'-O-methyluridine-3'-phosphate
  modified_base 20: mod_base = OTHER; note = 2'-fluoroadenosine-3'-phosphate
  modified_base 21: mod_base = OTHER; note = 2'-O-methylguanosine-3'-phosphorothioate
  modified_base 22: mod_base = OTHER; note = 2'-O-methyladenosine-3'-phosphorothioate
  modified_base 23: mod_base = OTHER; note = 2'-O-methyladenosine-3'-phosphate
acaaaagcaaaacaggtctagaa

SEQ ID NO: 253 - RNA, 21 nt, synthetic construct
  source 1..21: mol_type = other RNA; note = Description of Artificial Sequence: Synthetic oligonucleotide
  modified_base 1: mod_base = OTHER; note = 2'-fluorocytidine-3'-phosphorothioate
  modified_base 2: mod_base = OTHER; note = 2'-O-methyluridine-3'-phosphorothioate
  modified_base 3: mod_base = OTHER; note = 2'-fluoroadenosine-3'-phosphate
  modified_base 4: mod_base = OTHER; note = 2'-O-methylguanosine-3'-phosphate
  modified_base 5: mod_base = OTHER; note = 2'-fluoroadenosine-3'-phosphate
  modified_base 6: mod_base = OTHER; note = 2'-O-methylcytidine-3'-phosphate
  modified_base 7: mod_base = OTHER; note = 2'-fluorocytidine-3'-phosphate
  modified_base 8: mod_base = OTHER; note = 2'-O-methyluridine-3'-phosphate
  modified_base 9: mod_base = OTHER; note = 2'-fluoroguanosine-3'-phosphate
  modified_base 10: mod_base = OTHER; note = 2'-O-methyluridine-3'-phosphate
  modified_base 11: mod_base = OTHER; note = 2'-O-methyluridine-3'-phosphate
  modified_base 12: mod_base = OTHER; note = 2'-O-methyluridine-3'-phosphate
  modified_base 13: mod_base = OTHER; note = 2'-O-methyluridine-3'-phosphate
  modified_base 14: mod_base = OTHER; note = 2'-O-methylguanosine-3'-phosphate
  modified_base 15: mod_base = OTHER; note = 2'-fluorocytidine-3'-phosphate
  modified_base 16: mod_base = OTHER; note = 2'-O-methyluridine-3'-phosphate
  modified_base 17: mod_base = OTHER; note = 2'-O-methyluridine-3'-phosphate
  modified_base 18: mod_base = OTHER; note = 2'-O-methyluridine-3'-phosphate
  modified_base 19: mod_base = OTHER; note = 2'-O-methyluridine-3'-phosphate
  modified_base 20: mod_base = OTHER; note = 2'-O-methylguanosine-3'-phosphate
  modified_base 21: mod_base = OTHER; note = 2'-O-methyluridine-3'-phosphate N-[tris(GalNAc-alkyl)-amidodecanoyl)]-4-hydroxyprolinol Hyp-(GalNAc-alkyl)3
ctagacctgttttgcttttgt

SEQ ID NO: 254 - RNA, 23 nt, synthetic construct
  source 1..23: mol_type = other RNA; note = Description of Artificial Sequence: Synthetic oligonucleotide
  modified_base 1: mod_base = OTHER; note = 2'-O-methyladenosine-3'-phosphorothioate
  modified_base 2: mod_base = OTHER; note = 2'-fluorocytidine-3'-phosphorothioate
  modified_base 3: mod_base = OTHER; note = 2'-O-methyladenosine-3'-phosphate
  modified_base 4: mod_base = OTHER; note = 2'-fluoroadenosine-3'-phosphate
  modified_base 5: mod_base = OTHER; note = 2'-O-methyladenosine-3'-phosphate
  modified_base 6: mod_base = OTHER; note = 2'-fluoroadenosine-3'-phosphate
  modified_base 7: mod_base = OTHER; note = 2'-O-methylguanosine-3'-phosphate
  modified_base 8: mod_base = OTHER; note = 2'-fluorocytidine-3'-phosphate
  modified_base 9: mod_base = OTHER; note = 2'-O-methyladenosine-3'-phosphate
  modified_base 10: mod_base = OTHER; note = 2'-fluoroadenosine-3'-phosphate
  modified_base 11: mod_base = OTHER; note = 2'-O-methyladenosine-3'-phosphate
  modified_base 12: mod_base = OTHER; note = 2'-O-methyladenosine-3'-phosphate
  modified_base 13: mod_base = OTHER; note = 2'-O-methylcytidine-3'-phosphate
  modified_base 14: mod_base = OTHER; note = 2'-fluoroadenosine-3'-phosphate
  modified_base 15: mod_base = OTHER; note = 2'-O-methylguanosine-3'-phosphate
  modified_base 16: mod_base = OTHER; note = 2'-fluoroguanosine-3'-phosphate
  modified_base 17: mod_base = OTHER; note = 2'-O-methyluridine-3'-phosphate
  modified_base 18: mod_base = OTHER; note = 2'-fluorocytidine-3'-phosphate
  modified_base 19: mod_base = OTHER; note = 2'-O-methyluridine-3'-phosphate
  modified_base 20: mod_base = OTHER; note = 2'-fluoroadenosine-3'-phosphate
  modified_base 21: mod_base = OTHER; note = 2'-O-methylguanosine-3'-phosphorothioate
  modified_base 22: mod_base = OTHER; note = 2'-O-methyladenosine-3'-phosphorothioate
  modified_base 23: mod_base = OTHER; note = 2'-O-methyladenosine-3'-phosphate
acaaaagcaaaacaggtctagaa

SEQ ID NO: 255 - RNA, 21 nt, synthetic construct
  source 1..21: mol_type = other RNA; note = Description of Artificial Sequence: Synthetic oligonucleotide
  modified_base 1: mod_base = OTHER; note = 2'-fluorocytidine-3'-phosphorothioate
  modified_base 2: mod_base = OTHER; note = 2'-O-methyluridine-3'-phosphorothioate
  modified_base 3: mod_base = OTHER; note = 2'-fluoroadenosine-3'-phosphate
  modified_base 4: mod_base = OTHER; note = 2'-O-methylguanosine-3'-phosphate
  modified_base 5: mod_base = OTHER; note = 2'-fluoroadenosine-3'-phosphate
  modified_base 6: mod_base = OTHER; note = 2'-O-methylcytidine-3'-phosphate
  modified_base 7: mod_base = OTHER; note = 2'-fluorocytidine-3'-phosphate
  modified_base 8: mod_base = OTHER; note = 2'-O-methyluridine-3'-phosphate
  modified_base 9: mod_base = OTHER; note = 2'-fluoroguanosine-3'-phosphate
  modified_base 10: mod_base = OTHER; note = 2'-O-methyluridine-3'-phosphate
  modified_base 11: mod_base = OTHER; note = 2'-O-methyluridine-3'-phosphate
  modified_base 12: mod_base = OTHER; note = 2'-O-methyluridine-3'-phosphate
  modified_base 13: mod_base = OTHER; note = 2'-O-methyluridine-3'-phosphate
  modified_base 14: mod_base = OTHER; note = 2'-O-methylguanosine-3'-phosphate
  modified_base 15: mod_base = OTHER; note = 2'-O-methylcytidine-3'-phosphate
  modified_base 16: mod_base = OTHER; note = 2'-O-methyluridine-3'-phosphate
  modified_base 17: mod_base = OTHER; note = 2'-O-methyluridine-3'-phosphate
  modified_base 18: mod_base = OTHER; note = 2'-O-methyluridine-3'-phosphate
  modified_base 19: mod_base = OTHER; note = 2'-O-methyluridine-3'-phosphate
  modified_base 20: mod_base = OTHER; note = 2'-O-methylguanosine-3'-phosphate
  modified_base 21: mod_base = OTHER; note = 2'-O-methyluridine-3'-phosphate N-[tris(GalNAc-alkyl)-amidodecanoyl)]-4-hydroxyprolinol Hyp-(GalNAc-alkyl)3
ctagacctgttttgcttttgt

SEQ ID NO: 256 - RNA, 23 nt, synthetic construct
  source 1..23: mol_type = other RNA; note = Description of Artificial Sequence: Synthetic oligonucleotide
  modified_base 1: mod_base = OTHER; note = 2'-O-methyladenosine-3'-phosphorothioate
  modified_base 2: mod_base = OTHER; note = 2'-fluorocytidine-3'-phosphorothioate
  modified_base 3: mod_base = OTHER; note = 2'-O-methyladenosine-3'-phosphate
  modified_base 4: mod_base = OTHER; note = 2'-fluoroadenosine-3'-phosphate
  modified_base 5: mod_base = OTHER; note = 2'-O-methyladenosine-3'-phosphate
  modified_base 6: mod_base = OTHER; note = 2'-fluoroadenosine-3'-phosphate
  modified_base 7: mod_base = OTHER; note = 2'-O-methylguanosine-3'-phosphate
  modified_base 8: mod_base = OTHER; note = 2'-fluorocytidine-3'-phosphate
  modified_base 9: mod_base = OTHER; note = 2'-O-methyladenosine-3'-phosphate
  modified_base 10: mod_base = OTHER; note = 2'-fluoroadenosine-3'-phosphate
  modified_base 11: mod_base = OTHER; note = 2'-O-methyladenosine-3'-phosphate
  modified_base 12: mod_base = OTHER; note = 2'-O-methyladenosine-3'-phosphate
  modified_base 13: mod_base = OTHER; note = 2'-O-methylcytidine-3'-phosphate
  modified_base 14: mod_base = OTHER; note = 2'-fluoroadenosine-3'-phosphate
  modified_base 15: mod_base = OTHER; note = 2'-O-methylguanosine-3'-phosphate
  modified_base 16: mod_base = OTHER; note = 2'-fluoroguanosine-3'-phosphate
  modified_base 17: mod_base = OTHER; note = 2'-O-methyluridine-3'-phosphate
  modified_base 18: mod_base = OTHER; note = 2'-fluorocytidine-3'-phosphate
  modified_base 19: mod_base = OTHER; note = 2'-O-methyluridine-3'-phosphate
  modified_base 20: mod_base = OTHER; note = 2'-fluoroadenosine-3'-phosphate
  modified_base 21: mod_base = OTHER; note = 2'-O-methylguanosine-3'-phosphorothioate
  modified_base 22: mod_base = OTHER; note = 2'-O-methyladenosine-3'-phosphorothioate
  modified_base 23: mod_base = OTHER; note = 2'-O-methyladenosine-3'-phosphate
acaaaagcaaaacaggtctagaa

SEQ ID NO: 257 - RNA, 21 nt, synthetic construct
  source 1..21: mol_type = other RNA; note = Description of Artificial Sequence: Synthetic oligonucleotide
  modified_base 1: mod_base = OTHER; note = 2'-fluorocytidine-3'-phosphorothioate
  modified_base 2: mod_base = OTHER; note = 2'-O-methyluridine-3'-phosphorothioate
  modified_base 3: mod_base = OTHER; note = 2'-O-methyladenosine-3'-phosphate
  modified_base 4: mod_base = OTHER; note = 2'-O-methylguanosine-3'-phosphate
  modified_base 5: mod_base = OTHER; note = 2'-O-methyladenosine-3'-phosphate
  modified_base 6: mod_base = OTHER; note = 2'-O-methylcytidine-3'-phosphate
  modified_base 7: mod_base = OTHER; note = 2'-fluorocytidine-3'-phosphate
  modified_base 8: mod_base = OTHER; note = 2'-O-methyluridine-3'-phosphate
  modified_base 9: mod_base = OTHER; note = 2'-fluoroguanosine-3'-phosphate
  modified_base 10: mod_base = OTHER; note = 2'-O-methyluridine-3'-phosphate
  modified_base 11: mod_base = OTHER; note = 2'-O-methyluridine-3'-phosphate
  modified_base 12: mod_base = OTHER; note = 2'-O-methyluridine-3'-phosphate
  modified_base 13: mod_base = OTHER; note = 2'-O-methyluridine-3'-phosphate
  modified_base 14: mod_base = OTHER; note = 2'-O-methylguanosine-3'-phosphate
  modified_base 15: mod_base = OTHER; note = 2'-fluorocytidine-3'-phosphate
  modified_base 16: mod_base = OTHER; note = 2'-O-methyluridine-3'-phosphate
  modified_base 17: mod_base = OTHER; note = 2'-O-methyluridine-3'-phosphate
  modified_base 18: mod_base = OTHER; note = 2'-O-methyluridine-3'-phosphate
  modified_base 19: mod_base = OTHER; note = 2'-O-methyluridine-3'-phosphate
  modified_base 20: mod_base = OTHER; note = 2'-O-methylguanosine-3'-phosphate
  modified_base 21: mod_base = OTHER; note = 2'-O-methyluridine-3'-phosphate N-[tris(GalNAc-alkyl)-amidodecanoyl)]-4-hydroxyprolinol Hyp-(GalNAc-alkyl)3
ctagacctgttttgcttttgt

SEQ ID NO: 258 - RNA, 23 nt, synthetic construct
  source 1..23: mol_type = other RNA; note = Description of Artificial Sequence: Synthetic oligonucleotide
  modified_base 1: mod_base = OTHER; note = 2'-O-methyladenosine-3'-phosphorothioate
  modified_base 2: mod_base = OTHER; note = 2'-fluorocytidine-3'-phosphorothioate
  modified_base 3: mod_base = OTHER; note = 2'-O-methyladenosine-3'-phosphate
  modified_base 4: mod_base = OTHER; note = 2'-fluoroadenosine-3'-phosphate
  modified_base 5: mod_base = OTHER; note = 2'-O-methyladenosine-3'-phosphate
  modified_base 6: mod_base = OTHER; note = 2'-fluoroadenosine-3'-phosphate
  modified_base 7: mod_base = OTHER; note = 2'-O-methylguanosine-3'-phosphate
  modified_base 8: mod_base = OTHER; note = 2'-fluorocytidine-3'-phosphate
  modified_base 9: mod_base = OTHER; note = 2'-O-methyladenosine-3'-phosphate
  modified_base 10: mod_base = OTHER; note = 2'-fluoroadenosine-3'-phosphate
  modified_base 11: mod_base = OTHER; note = 2'-O-methyladenosine-3'-phosphate
  modified_base 12: mod_base = OTHER; note = 2'-O-methyladenosine-3'-phosphate
  modified_base 13: mod_base = OTHER; note = 2'-O-methylcytidine-3'-phosphate
  modified_base 14: mod_base = OTHER; note = 2'-fluoroadenosine-3'-phosphate
  modified_base 15: mod_base = OTHER; note = 2'-O-methylguanosine-3'-phosphate
  modified_base 16: mod_base = OTHER; note = 2'-fluoroguanosine-3'-phosphate
  modified_base 17: mod_base = OTHER; note = 2'-O-methyluridine-3'-phosphate
  modified_base 18: mod_base = OTHER; note = 2'-fluorocytidine-3'-phosphate
  modified_base 19: mod_base = OTHER; note = 2'-O-methyluridine-3'-phosphate
  modified_base 20: mod_base = OTHER; note = 2'-fluoroadenosine-3'-phosphate
  modified_base 21: mod_base = OTHER; note = 2'-O-methylguanosine-3'-phosphorothioate
  modified_base 22: mod_base = OTHER; note = 2'-O-methyladenosine-3'-phosphorothioate
  modified_base 23: mod_base = OTHER; note = 2'-O-methyladenosine-3'-phosphate
acaaaagcaaaacaggtctagaa

SEQ ID NO: 259 - RNA, 21 nt, synthetic construct
  source 1..21: mol_type = other RNA; note = Description of Artificial Sequence: Synthetic oligonucleotide
  modified_base 1: mod_base = OTHER; note = 2'-fluorocytidine-3'-phosphorothioate
  modified_base 2: mod_base = OTHER; note = 2'-O-methyluridine-3'-phosphorothioate
  modified_base 3: mod_base = OTHER; note = 2'-O-methyladenosine-3'-phosphate
  modified_base 4: mod_base = OTHER; note = 2'-O-methylguanosine-3'-phosphate
  modified_base 5: mod_base = OTHER; note = 2'-O-methyladenosine-3'-phosphate
  modified_base 6: mod_base = OTHER; note = 2'-O-methylcytidine-3'-phosphate
  modified_base 7: mod_base = OTHER; note = 2'-fluorocytidine-3'-phosphate
  modified_base 8: mod_base = OTHER; note = 2'-O-methyluridine-3'-phosphate
  modified_base 9: mod_base = OTHER; note = 2'-fluoroguanosine-3'-phosphate
  modified_base 10: mod_base = OTHER; note = 2'-O-methyluridine-3'-phosphate
  modified_base 11: mod_base = OTHER; note = 2'-O-methyluridine-3'-phosphate
  modified_base 12: mod_base = OTHER; note = 2'-O-methyluridine-3'-phosphate
  modified_base 13: mod_base = OTHER; note = 2'-O-methyluridine-3'-phosphate
  modified_base 14: mod_base = OTHER; note = 2'-O-methylguanosine-3'-phosphate
  modified_base 15: mod_base = OTHER; note = 2'-O-methylcytidine-3'-phosphate
  modified_base 16: mod_base = OTHER; note = 2'-O-methyluridine-3'-phosphate
  modified_base 17: mod_base = OTHER; note = 2'-O-methyluridine-3'-phosphate
  modified_base 18: mod_base = OTHER; note = 2'-O-methyluridine-3'-phosphate
  modified_base 19: mod_base = OTHER; note = 2'-O-methyluridine-3'-phosphate
  modified_base 20: mod_base = OTHER; note = 2'-O-methylguanosine-3'-phosphate
  modified_base 21: mod_base = OTHER; note = 2'-O-methyluridine-3'-phosphate N-[tris(GalNAc-alkyl)-amidodecanoyl)]-4-hydroxyprolinol Hyp-(GalNAc-alkyl)3
ctagacctgttttgcttttgt

SEQ ID NO: 260 - RNA, 23 nt, synthetic construct
  source 1..23: mol_type = other RNA; note = Description of Artificial Sequence: Synthetic oligonucleotide
  modified_base 1: mod_base = OTHER; note = 2'-O-methyladenosine-3'-phosphorothioate
  modified_base 2: mod_base = OTHER; note = 2'-fluorocytidine-3'-phosphorothioate
  modified_base 3: mod_base = OTHER; note = 2'-O-methyladenosine-3'-phosphate
  modified_base 4: mod_base = OTHER; note = 2'-fluoroadenosine-3'-phosphate
  modified_base 5: mod_base = OTHER; note = 2'-O-methyladenosine-3'-phosphate
  modified_base 6: mod_base = OTHER; note = 2'-fluoroadenosine-3'-phosphate
  modified_base 7: mod_base = OTHER; note = 2'-O-methylguanosine-3'-phosphate
  modified_base 8: mod_base = OTHER; note = 2'-fluorocytidine-3'-phosphate
  modified_base 9: mod_base = OTHER; note = 2'-O-methyladenosine-3'-phosphate
  modified_base 10: mod_base = OTHER; note = 2'-fluoroadenosine-3'-phosphate
  modified_base 11: mod_base = OTHER; note = 2'-O-methyladenosine-3'-phosphate
  modified_base 12: mod_base = OTHER; note = 2'-O-methyladenosine-3'-phosphate
  modified_base 13: mod_base = OTHER; note = 2'-O-methylcytidine-3'-phosphate
  modified_base 14: mod_base = OTHER; note = 2'-fluoroadenosine-3'-phosphate
  modified_base 15: mod_base = OTHER; note = 2'-O-methylguanosine-3'-phosphate
  modified_base 16: mod_base = OTHER; note = 2'-fluoroguanosine-3'-phosphate
  modified_base 17: mod_base = OTHER; note = 2'-O-methyluridine-3'-phosphate
  modified_base 18: mod_base = OTHER; note = 2'-fluorocytidine-3'-phosphate
  modified_base 19: mod_base = OTHER; note = 2'-O-methyluridine-3'-phosphate
  modified_base 20: mod_base = OTHER; note = 2'-fluoroadenosine-3'-phosphate
  modified_base 21: mod_base = OTHER; note = 2'-O-methylguanosine-3'-phosphorothioate
  modified_base 22: mod_base = OTHER; note = 2'-O-methyladenosine-3'-phosphorothioate
  modified_base 23: mod_base = OTHER; note = 2'-O-methyladenosine-3'-phosphate
acaaaagcaaaacaggtctagaa

SEQ ID NO: 261 - RNA, 21 nt, synthetic construct
  source 1..21: mol_type = other RNA; note = Description of Artificial Sequence: Synthetic oligonucleotide
  modified_base 1: mod_base = OTHER; note = 2'-O-methylcytidine-3'-phosphorothioate
  modified_base 2: mod_base = OTHER; note = 2'-O-methyluridine-3'-phosphorothioate
  modified_base 3: mod_base = OTHER; note = 2'-O-methyladenosine-3'-phosphate
  modified_base 4: mod_base = OTHER; note = 2'-O-methylguanosine-3'-phosphate
  modified_base 5: mod_base = OTHER; note = 2'-O-methyladenosine-3'-phosphate
  modified_base 6: mod_base = OTHER; note = 2'-O-methylcytidine-3'-phosphate
  modified_base 7: mod_base = OTHER; note = 2'-fluorocytidine-3'-phosphate
  modified_base 8: mod_base = OTHER; note = 2'-O-methyluridine-3'-phosphate
  modified_base 9: mod_base = OTHER; note = 2'-fluoroguanosine-3'-phosphate
  modified_base 10: mod_base = OTHER; note = 2'-O-methyluridine-3'-phosphate
  modified_base 11: mod_base = OTHER; note = 2'-O-methyluridine-3'-phosphate
  modified_base 12: mod_base = OTHER; note = 2'-O-methyluridine-3'-phosphate
  modified_base 13: mod_base = OTHER; note = 2'-O-methyluridine-3'-phosphate
  modified_base 14: mod_base = OTHER; note = 2'-O-methylguanosine-3'-phosphate
  modified_base 15: mod_base = OTHER; note = 2'-O-methylcytidine-3'-phosphate
  modified_base 16: mod_base = OTHER; note = 2'-O-methyluridine-3'-phosphate
  modified_base 17: mod_base = OTHER; note = 2'-O-methyluridine-3'-phosphate
  modified_base 18: mod_base = OTHER; note = 2'-O-methyluridine-3'-phosphate
  modified_base 19: mod_base = OTHER; note = 2'-O-methyluridine-3'-phosphate
  modified_base 20: mod_base = OTHER; note = 2'-O-methylguanosine-3'-phosphate
  modified_base 21: mod_base = OTHER; note = 2'-O-methyluridine-3'-phosphate N-[tris(GalNAc-alkyl)-amidodecanoyl)]-4-hydroxyprolinol Hyp-(GalNAc-alkyl)3
ctagacctgttttgcttttgt

SEQ ID NO: 262 - RNA, 23 nt, synthetic construct
  source 1..23: mol_type = other RNA; note = Description of Artificial Sequence: Synthetic oligonucleotide
  modified_base 1: mod_base = OTHER; note = 2'-O-methyladenosine-3'-phosphorothioate
  modified_base 2: mod_base = OTHER; note = 2'-fluorocytidine-3'-phosphorothioate
  modified_base 3: mod_base = OTHER; note = 2'-O-methyladenosine-3'-phosphate
  modified_base 4: mod_base = OTHER; note = 2'-fluoroadenosine-3'-phosphate
  modified_base 5: mod_base = OTHER; note = 2'-O-methyladenosine-3'-phosphate
  modified_base 6: mod_base = OTHER; note = 2'-fluoroadenosine-3'-phosphate
  modified_base 7: mod_base = OTHER; note = 2'-O-methylguanosine-3'-phosphate
  modified_base 8: mod_base = OTHER; note = 2'-fluorocytidine-3'-phosphate
  modified_base 9: mod_base = OTHER; note = 2'-O-methyladenosine-3'-phosphate
  modified_base 10: mod_base = OTHER; note = 2'-fluoroadenosine-3'-phosphate
  modified_base 11: mod_base = OTHER; note = 2'-O-methyladenosine-3'-phosphate
  modified_base 12: mod_base = OTHER; note = 2'-O-methyladenosine-3'-phosphate
  modified_base 13: mod_base = OTHER; note = 2'-O-methylcytidine-3'-phosphate
  modified_base 14: mod_base = OTHER; note = 2'-fluoroadenosine-3'-phosphate
  modified_base 15: mod_base = OTHER; note = 2'-O-methylguanosine-3'-phosphate
  modified_base 16: mod_base = OTHER; note = 2'-fluoroguanosine-3'-phosphate
  modified_base 17: mod_base = OTHER; note = 2'-O-methyluridine-3'-phosphate
  modified_base 18: mod_base = OTHER; note = 2'-fluorocytidine-3'-phosphate
  modified_base 19: mod_base = OTHER; note = 2'-O-methyluridine-3'-phosphate
  modified_base 20: mod_base = OTHER; note = 2'-fluoroadenosine-3'-phosphate
  modified_base 21: mod_base = OTHER; note = 2'-O-methylguanosine-3'-phosphorothioate
  modified_base 22: mod_base = OTHER; note = 2'-O-methyladenosine-3'-phosphorothioate
  modified_base 23: mod_base = OTHER; note = 2'-O-methyladenosine-3'-phosphate
acaaaagcaaaacaggtctagaa

SEQ ID NO: 263 - RNA, 21 nt, synthetic construct
  source 1..21: mol_type = other RNA; note = Description of Artificial Sequence: Synthetic oligonucleotide
  modified_base 1: mod_base = OTHER; note = 2'-fluorocytidine-3'-phosphorothioate
  modified_base 2: mod_base = OTHER; note = 2'-O-methyluridine-3'-phosphorothioate
  modified_base 3: mod_base = OTHER; note = 2'-fluoroadenosine-3'-phosphate
  modified_base 4: mod_base = OTHER; note = 2'-O-methylguanosine-3'-phosphate
  modified_base 5: mod_base = OTHER; note = 2'-fluoroadenosine-3'-phosphate
  modified_base 6: mod_base = OTHER; note = 2'-O-methylcytidine-3'-phosphate
  modified_base 7: mod_base = OTHER; note = 2'-fluorocytidine-3'-phosphate
  modified_base 8: mod_base = OTHER; note = 2'-O-methyluridine-3'-phosphate
  modified_base 9: mod_base = OTHER; note = 2'-fluoroguanosine-3'-phosphate
  modified_base 10: mod_base = OTHER; note = 2'-O-methyluridine-3'-phosphate
  modified_base 11: mod_base = OTHER; note = 2'-O-methyluridine-3'-phosphate
  modified_base 12: mod_base = OTHER; note = 2'-O-methyluridine-3'-phosphate
  modified_base 13: mod_base = OTHER; note = 2'-O-methyluridine-3'-phosphate
  modified_base 14: mod_base = OTHER; note = 2'-O-methylguanosine-3'-phosphate
  modified_base 15: mod_base = OTHER; note = 2'-fluorocytidine-3'-phosphate
  modified_base 16: mod_base = OTHER; note = 2'-O-methyluridine-3'-phosphate
  modified_base 17: mod_base = OTHER; note = 2'-O-methyluridine-3'-phosphate
  modified_base 18: mod_base = OTHER; note = 2'-O-methyluridine-3'-phosphate
  modified_base 19: mod_base = OTHER; note = 2'-O-methyluridine-3'-phosphate
  modified_base 20: mod_base = OTHER; note = 2'-O-methylguanosine-3'-phosphate
  modified_base 21: mod_base = OTHER; note = 2'-O-methyluridine-3'-phosphate N-[tris(GalNAc-alkyl)-amidodecanoyl)]-4-hydroxyprolinol Hyp-(GalNAc-alkyl)3
ctagacctgttttgcttttgt

SEQ ID NO: 264 - RNA, 23 nt, synthetic construct
  source 1..23: mol_type = other RNA; note = Description of Artificial Sequence: Synthetic oligonucleotide
  modified_base 1: mod_base = OTHER; note = 2'-O-methyladenosine-3'-phosphorothioate
  modified_base 2: mod_base = OTHER; note = 2'-fluorocytidine-3'-phosphorothioate
  modified_base 3: mod_base = OTHER; note = 2'-O-methyladenosine-3'-phosphate
  modified_base 4: mod_base = OTHER; note = 2'-fluoroadenosine-3'-phosphate
  modified_base 5: mod_base = OTHER; note = 2'-O-methyladenosine-3'-phosphate
  modified_base 6: mod_base = OTHER; note = 2'-fluoroadenosine-3'-phosphate
  modified_base 7: mod_base = OTHER; note = 2'-O-methylguanosine-3'-phosphate
  modified_base 8: mod_base = OTHER; note = 2'-fluorocytidine-3'-phosphate
  modified_base 9: mod_base = OTHER; note = 2'-O-methyladenosine-3'-phosphate
  modified_base 10: mod_base = OTHER; note = 2'-fluoroadenosine-3'-phosphate
  modified_base 11: mod_base = OTHER; note = 2'-fluoroadenosine-3'-phosphate
  modified_base 12: mod_base = OTHER; note = 2'-fluoroadenosine-3'-phosphate
  modified_base 13: mod_base = OTHER; note = 2'-O-methylcytidine-3'-phosphate
  modified_base 14: mod_base = OTHER; note = 2'-fluoroadenosine-3'-phosphate
  modified_base 15: mod_base = OTHER; note = 2'-O-methylguanosine-3'-phosphate
  modified_base 16: mod_base = OTHER; note = 2'-fluoroguanosine-3'-phosphate
  modified_base 17: mod_base = OTHER; note = 2'-O-methyluridine-3'-phosphate
  modified_base 18: mod_base = OTHER; note = 2'-fluorocytidine-3'-phosphate
  modified_base 19: mod_base = OTHER; note = 2'-O-methyluridine-3'-phosphate
  modified_base 20: mod_base = OTHER; note = 2'-fluoroadenosine-3'-phosphate
  modified_base 21: mod_base = OTHER; note = 2'-O-methylguanosine-3'-phosphorothioate
  modified_base 22: mod_base = OTHER; note = 2'-O-methyladenosine-3'-phosphorothioate
  modified_base 23: mod_base = OTHER; note = 2'-O-methyladenosine-3'-phosphate
acaaaagcaaaacaggtctagaa

SEQ ID NO: 265 - RNA, 21 nt, synthetic construct
  source 1..21: mol_type = other RNA; note = Description of Artificial Sequence: Synthetic oligonucleotide
  modified_base 1: mod_base = OTHER; note = 2'-fluorocytidine-3'-phosphorothioate
  modified_base 2: mod_base = OTHER; note = 2'-O-methyluridine-3'-phosphorothioate
  modified_base 3: mod_base = OTHER; note = 2'-fluoroadenosine-3'-phosphate
  modified_base 4: mod_base = OTHER; note = 2'-O-methylguanosine-3'-phosphate
  modified_base 5: mod_base = OTHER; note = 2'-fluoroadenosine-3'-phosphate
  modified_base 6: mod_base = OTHER; note = 2'-O-methylcytidine-3'-phosphate
  modified_base 7: mod_base = OTHER; note = 2'-fluorocytidine-3'-phosphate
  modified_base 8: mod_base = OTHER; note = 2'-O-methyluridine-3'-phosphate
  modified_base 9: mod_base = OTHER; note = 2'-fluoroguanosine-3'-phosphate
  modified_base 10: mod_base = OTHER; note = 2'-O-methyluridine-3'-phosphate
  modified_base 11: mod_base = OTHER; note = 2'-O-methyluridine-3'-phosphate
  modified_base 12: mod_base = OTHER; note = 2'-O-methyluridine-3'-phosphate
  modified_base 13: mod_base = OTHER; note = 2'-O-methyluridine-3'-phosphate
  modified_base 14: mod_base = OTHER; note = 2'-O-methylguanosine-3'-phosphate
  modified_base 15: mod_base = OTHER; note = 2'-O-methylcytidine-3'-phosphate
  modified_base 16: mod_base = OTHER; note = 2'-O-methyluridine-3'-phosphate
  modified_base 17: mod_base = OTHER; note = 2'-O-methyluridine-3'-phosphate
  modified_base 18: mod_base = OTHER; note = 2'-O-methyluridine-3'-phosphate
  modified_base 19: mod_base = OTHER; note = 2'-O-methyluridine-3'-phosphate
  modified_base 20: mod_base = OTHER; note = 2'-O-methylguanosine-3'-phosphate
  modified_base 21: mod_base = OTHER; note = 2'-O-methyluridine-3'-phosphate N-[tris(GalNAc-alkyl)-amidodecanoyl)]-4-hydroxyprolinol Hyp-(GalNAc-alkyl)3
ctagacctgttttgcttttgt

SEQ ID NO: 266 - RNA, 23 nt, synthetic construct
  source 1..23: mol_type = other RNA; note = Description of Artificial Sequence: Synthetic oligonucleotide
  modified_base 1: mod_base = OTHER; note = 2'-O-methyladenosine-3'-phosphorothioate
  modified_base 2: mod_base = OTHER; note = 2'-fluorocytidine-3'-phosphorothioate
  modified_base 3: mod_base = OTHER; note = 2'-O-methyladenosine-3'-phosphate
  modified_base 4: mod_base = OTHER; note = 2'-fluoroadenosine-3'-phosphate
  modified_base 5: mod_base = OTHER; note = 2'-O-methyladenosine-3'-phosphate
  modified_base 6: mod_base = OTHER; note = 2'-fluoroadenosine-3'-phosphate
  modified_base 7: mod_base = OTHER; note = 2'-O-methylguanosine-3'-phosphate
  modified_base 8: mod_base = OTHER; note = 2'-fluorocytidine-3'-phosphate
  modified_base 9: mod_base = OTHER; note = 2'-O-methyladenosine-3'-phosphate
  modified_base 10: mod_base = OTHER; note = 2'-fluoroadenosine-3'-phosphate
  modified_base 11: mod_base = OTHER; note = 2'-fluoroadenosine-3'-phosphate
  modified_base 12: mod_base = OTHER; note = 2'-fluoroadenosine-3'-phosphate
  modified_base 13: mod_base = OTHER; note = 2'-O-methylcytidine-3'-phosphate
  modified_base 14: mod_base = OTHER; note = 2'-fluoroadenosine-3'-phosphate
  modified_base 15: mod_base = OTHER; note = 2'-O-methylguanosine-3'-phosphate
  modified_base 16: mod_base = OTHER; note = 2'-fluoroguanosine-3'-phosphate
  modified_base 17: mod_base = OTHER; note = 2'-O-methyluridine-3'-phosphate
  modified_base 18: mod_base = OTHER; note = 2'-fluorocytidine-3'-phosphate
  modified_base 19: mod_base = OTHER; note = 2'-O-methyluridine-3'-phosphate
  modified_base 20: mod_base = OTHER; note = 2'-fluoroadenosine-3'-phosphate
  modified_base 21: mod_base = OTHER; note = 2'-O-methylguanosine-3'-phosphorothioate
  modified_base 22: mod_base = OTHER; note = 2'-O-methyladenosine-3'-phosphorothioate
  modified_base 23: mod_base = OTHER; note = 2'-O-methyladenosine-3'-phosphate
acaaaagcaaaacaggtctagaa

SEQ ID NO: 267 - RNA, 21 nt, synthetic construct
  source 1..21: mol_type = other RNA; note = Description of Artificial Sequence: Synthetic oligonucleotide
  modified_base 1: mod_base = OTHER; note = 2'-fluorocytidine-3'-phosphorothioate
  modified_base 2: mod_base = OTHER; note = 2'-O-methyluridine-3'-phosphorothioate
  modified_base 3: mod_base = OTHER; note = 2'-O-methyladenosine-3'-phosphate
  modified_base 4: mod_base = OTHER; note = 2'-O-methylguanosine-3'-phosphate
  modified_base 5: mod_base = OTHER; note = 2'-O-methyladenosine-3'-phosphate
  modified_base 6: mod_base = OTHER; note = 2'-O-methylcytidine-3'-phosphate
  modified_base 7: mod_base = OTHER; note = 2'-fluorocytidine-3'-phosphate
  modified_base 8: mod_base = OTHER; note = 2'-O-methyluridine-3'-phosphate
  modified_base 9: mod_base = OTHER; note = 2'-fluoroguanosine-3'-phosphate
  modified_base 10: mod_base = OTHER; note = 2'-O-methyluridine-3'-phosphate
  modified_base 11: mod_base = OTHER; note = 2'-O-methyluridine-3'-phosphate
  modified_base 12: mod_base = OTHER; note = 2'-O-methyluridine-3'-phosphate
  modified_base 13: mod_base = OTHER; note = 2'-O-methyluridine-3'-phosphate
  modified_base 14: mod_base = OTHER; note = 2'-O-methylguanosine-3'-phosphate
  modified_base 15: mod_base = OTHER; note = 2'-fluorocytidine-3'-phosphate
  modified_base 16: mod_base = OTHER; note = 2'-O-methyluridine-3'-phosphate
  modified_base 17: mod_base = OTHER; note = 2'-O-methyluridine-3'-phosphate
  modified_base 18: mod_base = OTHER; note = 2'-O-methyluridine-3'-phosphate
  modified_base 19: mod_base = OTHER; note = 2'-O-methyluridine-3'-phosphate
  modified_base 20: mod_base = OTHER; note = 2'-O-methylguanosine-3'-phosphate
  modified_base 21: mod_base = OTHER; note = 2'-O-methyluridine-3'-phosphate N-[tris(GalNAc-alkyl)-amidodecanoyl)]-4-hydroxyprolinol Hyp-(GalNAc-alkyl)3
ctagacctgttttgcttttgt

SEQ ID NO: 268 - RNA, 23 nt, synthetic construct
  source 1..23: mol_type = other RNA; note = Description of Artificial Sequence: Synthetic oligonucleotide
  modified_base 1: mod_base = OTHER; note = 2'-O-methyladenosine-3'-phosphorothioate
  modified_base 2: mod_base = OTHER; note = 2'-fluorocytidine-3'-phosphorothioate
  modified_base 3: mod_base = OTHER; note = 2'-O-methyladenosine-3'-phosphate
  modified_base 4: mod_base = OTHER; note = 2'-fluoroadenosine-3'-phosphate
  modified_base 5: mod_base = OTHER; note = 2'-O-methyladenosine-3'-phosphate
  modified_base 6: mod_base = OTHER; note = 2'-fluoroadenosine-3'-phosphate
  modified_base 7: mod_base = OTHER; note = 2'-O-methylguanosine-3'-phosphate
  modified_base 8: mod_base = OTHER; note = 2'-fluorocytidine-3'-phosphate
  modified_base 9: mod_base = OTHER; note = 2'-O-methyladenosine-3'-phosphate
  modified_base 10: mod_base = OTHER; note = 2'-fluoroadenosine-3'-phosphate
  modified_base 11: mod_base = OTHER; note = 2'-fluoroadenosine-3'-phosphate
  modified_base 12: mod_base = OTHER; note = 2'-fluoroadenosine-3'-phosphate
  modified_base 13: mod_base = OTHER; note = 2'-O-methylcytidine-3'-phosphate
  modified_base 14: mod_base = OTHER; note = 2'-fluoroadenosine-3'-phosphate
  modified_base 15: mod_base = OTHER; note = 2'-O-methylguanosine-3'-phosphate
  modified_base 16: mod_base = OTHER; note = 2'-fluoroguanosine-3'-phosphate
  modified_base 17: mod_base = OTHER; note = 2'-O-methyluridine-3'-phosphate
  modified_base 18: mod_base = OTHER; note = 2'-fluorocytidine-3'-phosphate
  modified_base 19: mod_base = OTHER; note = 2'-O-methyluridine-3'-phosphate
  modified_base 20: mod_base = OTHER; note = 2'-fluoroadenosine-3'-phosphate
  modified_base 21: mod_base = OTHER; note = 2'-O-methylguanosine-3'-phosphorothioate
  modified_base 22: mod_base = OTHER; note = 2'-O-methyladenosine-3'-phosphorothioate
  modified_base 23: mod_base = OTHER; note = 2'-O-methyladenosine-3'-phosphate
acaaaagcaaaacaggtctagaa

SEQ ID NO: 269 - RNA, 21 nt, synthetic construct
  source 1..21: mol_type = other RNA; note = Description of Artificial Sequence: Synthetic oligonucleotide
  modified_base 1: mod_base = OTHER; note = 2'-fluorocytidine-3'-phosphorothioate
  modified_base 2: mod_base = OTHER; note = 2'-O-methyluridine-3'-phosphorothioate
  modified_base 3: mod_base = OTHER; note = 2'-O-methyladenosine-3'-phosphate
  modified_base 4: mod_base = OTHER; note = 2'-O-methylguanosine-3'-phosphate
  modified_base 5: mod_base = OTHER; note = 2'-O-methyladenosine-3'-phosphate
  modified_base 6: mod_base = OTHER; note = 2'-O-methylcytidine-3'-phosphate
  modified_base 7: mod_base = OTHER; note = 2'-fluorocytidine-3'-phosphate
  modified_base 8: mod_base = OTHER; note = 2'-O-methyluridine-3'-phosphate
  modified_base 9: mod_base = OTHER; note = 2'-fluoroguanosine-3'-phosphate
  modified_base 10: mod_base = OTHER; note = 2'-O-methyluridine-3'-phosphate
  modified_base 11: mod_base = OTHER; note = 2'-O-methyluridine-3'-phosphate
  modified_base 12: mod_base = OTHER; note = 2'-O-methyluridine-3'-phosphate
  modified_base 13: mod_base = OTHER; note = 2'-O-methyluridine-3'-phosphate
  modified_base 14: mod_base = OTHER; note = 2'-O-methylguanosine-3'-phosphate
  modified_base 15: mod_base = OTHER; note = 2'-O-methylcytidine-3'-phosphate
  modified_base 16: mod_base = OTHER; note = 2'-O-methyluridine-3'-phosphate
  modified_base 17: mod_base = OTHER; note = 2'-O-methyluridine-3'-phosphate
  modified_base 18: mod_base = OTHER; note = 2'-O-methyluridine-3'-phosphate
  modified_base 19: mod_base = OTHER; note = 2'-O-methyluridine-3'-phosphate
  modified_base 20: mod_base = OTHER; note = 2'-O-methylguanosine-3'-phosphate
  modified_base 21: mod_base = OTHER; note = 2'-O-methyluridine-3'-phosphate N-[tris(GalNAc-alkyl)-amidodecanoyl)]-4-hydroxyprolinol Hyp-(GalNAc-alkyl)3
ctagacctgttttgcttttgt

SEQ ID NO: 270 - RNA, 23 nt, synthetic construct
  source 1..23: mol_type = other RNA; note = Description of Artificial Sequence: Synthetic oligonucleotide
  modified_base 1: mod_base = OTHER; note = 2'-O-methyladenosine-3'-phosphorothioate
  modified_base 2: mod_base = OTHER; note = 2'-fluorocytidine-3'-phosphorothioate
  modified_base 3: mod_base = OTHER; note = 2'-O-methyladenosine-3'-phosphate
  modified_base 4: mod_base = OTHER; note = 2'-fluoroadenosine-3'-phosphate
  modified_base 5: mod_base = OTHER; note = 2'-O-methyladenosine-3'-phosphate
  modified_base 6: mod_base = OTHER; note = 2'-fluoroadenosine-3'-phosphate
  modified_base 7: mod_base = OTHER; note = 2'-O-methylguanosine-3'-phosphate
  modified_base 8: mod_base = OTHER; note = 2'-fluorocytidine-3'-phosphate
  modified_base 9: mod_base = OTHER; note = 2'-O-methyladenosine-3'-phosphate
  modified_base 10: mod_base = OTHER; note = 2'-fluoroadenosine-3'-phosphate
  modified_base 11: mod_base = OTHER; note = 2'-fluoroadenosine-3'-phosphate
  modified_base 12: mod_base = OTHER; note = 2'-fluoroadenosine-3'-phosphate
  modified_base 13: mod_base = OTHER; note = 2'-O-methylcytidine-3'-phosphate
  modified_base 14: mod_base = OTHER; note = 2'-fluoroadenosine-3'-phosphate
  modified_base 15: mod_base = OTHER; note = 2'-O-methylguanosine-3'-phosphate
  modified_base 16: mod_base = OTHER; note = 2'-fluoroguanosine-3'-phosphate
  modified_base 17: mod_base = OTHER; note = 2'-O-methyluridine-3'-phosphate
  modified_base 18: mod_base = OTHER; note = 2'-fluorocytidine-3'-phosphate
  modified_base 19: mod_base = OTHER; note = 2'-O-methyluridine-3'-phosphate
  modified_base 20: mod_base = OTHER; note = 2'-fluoroadenosine-3'-phosphate
  modified_base 21: mod_base = OTHER; note = 2'-O-methylguanosine-3'-phosphorothioate
  modified_base 22: mod_base = OTHER; note = 2'-O-methyladenosine-3'-phosphorothioate
  modified_base 23: mod_base = OTHER; note = 2'-O-methyladenosine-3'-phosphate
acaaaagcaaaacaggtctagaa

SEQ ID NO: 271 - RNA, 21 nt, synthetic construct
  source 1..21: mol_type = other RNA; note = Description of Artificial Sequence: Synthetic oligonucleotide
  modified_base 1: mod_base = OTHER; note = 2'-O-methylcytidine-3'-phosphorothioate
  modified_base 2: mod_base = OTHER; note = 2'-O-methyluridine-3'-phosphorothioate
  modified_base 3: mod_base = OTHER; note = 2'-O-methyladenosine-3'-phosphate
  modified_base 4: mod_base = OTHER; note = 2'-O-methylguanosine-3'-phosphate
  modified_base 5: mod_base = OTHER; note = 2'-O-methyladenosine-3'-phosphate
  modified_base 6: mod_base = OTHER; note = 2'-O-methylcytidine-3'-phosphate
  modified_base 7: mod_base = OTHER; note = 2'-fluorocytidine-3'-phosphate
  modified_base 8: mod_base = OTHER; note = 2'-O-methyluridine-3'-phosphate
  modified_base 9: mod_base = OTHER; note = 2'-fluoroguanosine-3'-phosphate
  modified_base 10: mod_base = OTHER; note = 2'-O-methyluridine-3'-phosphate
  modified_base 11: mod_base = OTHER; note = 2'-O-methyluridine-3'-phosphate
  modified_base 12: mod_base = OTHER; note = 2'-O-methyluridine-3'-phosphate
  modified_base 13: mod_base = OTHER; note = 2'-O-methyluridine-3'-phosphate
  modified_base 14: mod_base = OTHER; note = 2'-O-methylguanosine-3'-phosphate
  modified_base 15: mod_base = OTHER; note = 2'-O-methylcytidine-3'-phosphate
  modified_base 16: mod_base = OTHER; note = 2'-O-methyluridine-3'-phosphate
  modified_base 17: mod_base = OTHER; note = 2'-O-methyluridine-3'-phosphate
  modified_base 18: mod_base = OTHER; note = 2'-O-methyluridine-3'-phosphate
  modified_base 19: mod_base = OTHER; note = 2'-O-methyluridine-3'-phosphate
  modified_base 20: mod_base = OTHER; note = 2'-O-methylguanosine-3'-phosphate
  modified_base 21: mod_base = OTHER; note = 2'-O-methyluridine-3'-phosphate N-[tris(GalNAc-alkyl)-amidodecanoyl)]-4-hydroxyprolinol Hyp-(GalNAc-alkyl)3
ctagacctgttttgcttttgt

SEQ ID NO: 272 - RNA, 23 nt, synthetic construct
  source 1..23: mol_type = other RNA; note = Description of Artificial Sequence: Synthetic oligonucleotide
  modified_base 1: mod_base = OTHER; note = 2'-O-methyladenosine-3'-phosphorothioate
  modified_base 2: mod_base = OTHER; note = 2'-fluorocytidine-3'-phosphorothioate
  modified_base 3: mod_base = OTHER; note = 2'-O-methyladenosine-3'-phosphate
  modified_base 4: mod_base = OTHER; note = 2'-fluoroadenosine-3'-phosphate
  modified_base 5: mod_base = OTHER; note = 2'-O-methyladenosine-3'-phosphate
  modified_base 6: mod_base = OTHER; note = 2'-fluoroadenosine-3'-phosphate
  modified_base 7: mod_base = OTHER; note = 2'-O-methylguanosine-3'-phosphate
  modified_base 8: mod_base = OTHER; note = 2'-fluorocytidine-3'-phosphate
  modified_base 9: mod_base = OTHER; note = 2'-O-methyladenosine-3'-phosphate
  modified_base 10: mod_base = OTHER; note = 2'-fluoroadenosine-3'-phosphate
  modified_base 11: mod_base = OTHER; note = 2'-fluoroadenosine-3'-phosphate
  modified_base 12: mod_base = OTHER; note = 2'-fluoroadenosine-3'-phosphate
  modified_base 13: mod_base = OTHER; note = 2'-O-methylcytidine-3'-phosphate
  modified_base 14: mod_base = OTHER; note = 2'-fluoroadenosine-3'-phosphate
  modified_base 15: mod_base = OTHER; note = 2'-O-methylguanosine-3'-phosphate
  modified_base 16: mod_base = OTHER; note = 2'-fluoroguanosine-3'-phosphate
  modified_base 17: mod_base = OTHER; note = 2'-O-methyluridine-3'-phosphate
  modified_base 18: mod_base = OTHER; note = 2'-fluorocytidine-3'-phosphate
  modified_base 19: mod_base = OTHER; note = 2'-O-methyluridine-3'-phosphate
  modified_base 20: mod_base = OTHER; note = 2'-fluoroadenosine-3'-phosphate
  modified_base 21: mod_base = OTHER; note = 2'-O-methylguanosine-3'-phosphorothioate
  modified_base 22: mod_base = OTHER; note = 2'-O-methyladenosine-3'-phosphorothioate
  modified_base 23: mod_base = OTHER; note = 2'-O-methyladenosine-3'-phosphate
acaaaagcaaaacaggtctagaa

SEQ ID NO: 273 - RNA, 21 nt, synthetic construct
  source 1..21: mol_type = other RNA; note = Description of Artificial Sequence: Synthetic oligonucleotide
  modified_base 1: mod_base = OTHER; note = 2'-fluorocytidine-3'-phosphorothioate
  modified_base 2: mod_base = OTHER; note = 2'-O-methyluridine-3'-phosphorothioate
  modified_base 3: mod_base = OTHER; note = 2'-fluoroadenosine-3'-phosphate
  modified_base 4: mod_base = OTHER; note = 2'-O-methylguanosine-3'-phosphate
  modified_base 5: mod_base = OTHER; note = 2'-fluoroadenosine-3'-phosphate
  modified_base 6: mod_base = OTHER; note = 2'-O-methylcytidine-3'-phosphate
  modified_base 7: mod_base = OTHER; note = 2'-fluorocytidine-3'-phosphate
  modified_base 8: mod_base = OTHER; note = 2'-O-methyluridine-3'-phosphate
  modified_base 9: mod_base = OTHER; note = 2'-fluoroguanosine-3'-phosphate
  modified_base 10: mod_base = OTHER; note = 2'-O-methyluridine-3'-phosphate
  modified_base 11: mod_base = OTHER; note = 2'-O-methyluridine-3'-phosphate
  modified_base 12: mod_base = OTHER; note = 2'-O-methyluridine-3'-phosphate
  modified_base 13: mod_base = OTHER; note = 2'-O-methyluridine-3'-phosphate
  modified_base 14: mod_base = OTHER; note = 2'-O-methylguanosine-3'-phosphate
  modified_base 15: mod_base = OTHER; note = 2'-fluorocytidine-3'-phosphate
  modified_base 16: mod_base = OTHER; note = 2'-O-methyluridine-3'-phosphate
  modified_base 17: mod_base = OTHER; note = 2'-O-methyluridine-3'-phosphate
  modified_base 18: mod_base = OTHER; note = 2'-O-methyluridine-3'-phosphate
  modified_base 19: mod_base = OTHER; note = 2'-O-methyluridine-3'-phosphate
  modified_base 20: mod_base = OTHER; note = 2'-O-methylguanosine-3'-phosphate
  modified_base 21: mod_base = OTHER; note = 2'-O-methyluridine-3'-phosphate N-[tris(GalNAc-alkyl)-amidodecanoyl)]-4-hydroxyprolinol Hyp-(GalNAc-alkyl)3
ctagacctgttttgcttttgt

SEQ ID NO: 274 - RNA, 23 nt, synthetic construct
  source 1..23: mol_type = other RNA; note = Description of Artificial Sequence: Synthetic oligonucleotide
  modified_base 1: mod_base = OTHER; note = 2'-O-methyladenosine-3'-phosphorothioate
  modified_base 2: mod_base = OTHER; note = 2'-fluorocytidine-3'-phosphorothioate
  modified_base 3: mod_base = OTHER; note = 2'-O-methyladenosine-3'-phosphate
  modified_base 4: mod_base = OTHER; note = 2'-fluoroadenosine-3'-phosphate
  modified_base 5: mod_base = OTHER; note = 2'-fluoroadenosine-3'-phosphate
  modified_base 6: mod_base = OTHER; note = 2'-fluoroadenosine-3'-phosphate
  modified_base 7: mod_base = OTHER; note = 2'-O-methylguanosine-3'-phosphate
  modified_base 8: mod_base = OTHER; note = 2'-fluorocytidine-3'-phosphate
  modified_base 9: mod_base = OTHER; note = 2'-O-methyladenosine-3'-phosphate
  modified_base 10: mod_base = OTHER; note = 2'-fluoroadenosine-3'-phosphate
  modified_base 11: mod_base = OTHER; note = 2'-O-methyladenosine-3'-phosphate
  modified_base 12: mod_base = OTHER; note = 2'-fluoroadenosine-3'-phosphate
  modified_base 13: mod_base = OTHER; note = 2'-O-methylcytidine-3'-phosphate
  modified_base 14: mod_base = OTHER; note = 2'-fluoroadenosine-3'-phosphate
  modified_base 15: mod_base = OTHER; note = 2'-O-methylguanosine-3'-phosphate
  modified_base 16: mod_base = OTHER; note = 2'-fluoroguanosine-3'-phosphate
  modified_base 17: mod_base = OTHER; note = 2'-O-methyluridine-3'-phosphate
  modified_base 18: mod_base = OTHER; note = 2'-fluorocytidine-3'-phosphate
  modified_base 19: mod_base = OTHER; note = 2'-O-methyluridine-3'-phosphate
  modified_base 20: mod_base = OTHER; note = 2'-O-methyladenosine-3'-phosphate
  modified_base 21: mod_base = OTHER; note = 2'-O-methylguanosine-3'-phosphorothioate
  modified_base 22: mod_base = OTHER; note = 2'-O-methyladenosine-3'-phosphorothioate
  modified_base 23: mod_base = OTHER; note = 2'-O-methyladenosine-3'-phosphate
acaaaagcaaaacaggtctagaa

SEQ ID NO: 275 - RNA, 21 nt, synthetic construct
  source 1..21: mol_type = other RNA; note = Description of Artificial Sequence: Synthetic oligonucleotide
  modified_base 1: mod_base = OTHER; note = 2'-fluorocytidine-3'-phosphorothioate
  modified_base 2: mod_base = OTHER; note = 2'-O-methyluridine-3'-phosphorothioate
  modified_base 3: mod_base = OTHER; note = 2'-fluoroadenosine-3'-phosphate
  modified_base 4: mod_base = OTHER; note = 2'-O-methylguanosine-3'-phosphate
  modified_base 5: mod_base = OTHER; note = 2'-fluoroadenosine-3'-phosphate
  modified_base 6: mod_base = OTHER; note = 2'-O-methylcytidine-3'-phosphate
  modified_base 7: mod_base = OTHER; note = 2'-fluorocytidine-3'-phosphate
  modified_base 8: mod_base = OTHER; note = 2'-O-methyluridine-3'-phosphate
  modified_base 9: mod_base = OTHER; note = 2'-fluoroguanosine-3'-phosphate
  modified_base 10: mod_base = OTHER; note = 2'-O-methyluridine-3'-phosphate
  modified_base 11: mod_base = OTHER; note = 2'-O-methyluridine-3'-phosphate
  modified_base 12: mod_base = OTHER; note = 2'-O-methyluridine-3'-phosphate
  modified_base 13: mod_base = OTHER; note = 2'-O-methyluridine-3'-phosphate
  modified_base 14: mod_base = OTHER; note = 2'-O-methylguanosine-3'-phosphate
  modified_base 15: mod_base = OTHER; note = 2'-O-methylcytidine-3'-phosphate
  modified_base 16: mod_base = OTHER; note = 2'-O-methyluridine-3'-phosphate
  modified_base 17: mod_base = OTHER; note = 2'-O-methyluridine-3'-phosphate
  modified_base 18: mod_base = OTHER; note = 2'-O-methyluridine-3'-phosphate
  modified_base 19: mod_base = OTHER; note = 2'-O-methyluridine-3'-phosphate
  modified_base 20: mod_base = OTHER; note = 2'-O-methylguanosine-3'-phosphate
  modified_base 21: mod_base = OTHER; note = 2'-O-methyluridine-3'-phosphate N-[tris(GalNAc-alkyl)-amidodecanoyl)]-4-hydroxyprolinol Hyp-(GalNAc-alkyl)3
ctagacctgttttgcttttgt

SEQ ID NO: 276 - RNA, 23 nt, synthetic construct
  source 1..23: mol_type = other RNA; note = Description of Artificial Sequence: Synthetic oligonucleotide
  modified_base 1: mod_base = OTHER; note = 2'-O-methyladenosine-3'-phosphorothioate
  modified_base 2: mod_base = OTHER; note = 2'-fluorocytidine-3'-phosphorothioate
  modified_base 3: mod_base = OTHER; note = 2'-O-methyladenosine-3'-phosphate
  modified_base 4: mod_base = OTHER; note = 2'-fluoroadenosine-3'-phosphate
  modified_base 5: mod_base = OTHER; note = 2'-fluoroadenosine-3'-phosphate
  modified_base 6: mod_base = OTHER; note = 2'-fluoroadenosine-3'-phosphate
  modified_base 7: mod_base = OTHER; note = 2'-O-methylguanosine-3'-phosphate
  modified_base 8: mod_base = OTHER; note = 2'-fluorocytidine-3'-phosphate
  modified_base 9: mod_base = OTHER; note = 2'-O-methyladenosine-3'-phosphate
  modified_base 10: mod_base = OTHER; note = 2'-fluoroadenosine-3'-phosphate
  modified_base 11: mod_base = OTHER; note = 2'-O-methyladenosine-3'-phosphate
  modified_base 12: mod_base = OTHER; note = 2'-fluoroadenosine-3'-phosphate
  modified_base 13: mod_base = OTHER; note = 2'-O-methylcytidine-3'-phosphate
  modified_base 14: mod_base = OTHER; note = 2'-fluoroadenosine-3'-phosphate
  modified_base 15: mod_base = OTHER; note = 2'-O-methylguanosine-3'-phosphate
  modified_base 16: mod_base = OTHER; note = 2'-fluoroguanosine-3'-phosphate
  modified_base 17: mod_base = OTHER; note = 2'-O-methyluridine-3'-phosphate
  modified_base 18: mod_base = OTHER; note = 2'-fluorocytidine-3'-phosphate
  modified_base 19: mod_base = OTHER; note = 2'-O-methyluridine-3'-phosphate
  modified_base 20: mod_base = OTHER; note = 2'-O-methyladenosine-3'-phosphate
  modified_base 21: mod_base = OTHER; note = 2'-O-methylguanosine-3'-phosphorothioate
  modified_base 22: mod_base = OTHER; note = 2'-O-methyladenosine-3'-phosphorothioate
  modified_base 23: mod_base = OTHER; note = 2'-O-methyladenosine-3'-phosphate
acaaaagcaaaacaggtctagaa

SEQ ID NO: 277 - RNA, 21 nt, synthetic construct
  source 1..21: mol_type = other RNA; note = Description of Artificial Sequence: Synthetic oligonucleotide
  modified_base 1: mod_base = OTHER; note = 2'-fluorocytidine-3'-phosphorothioate
  modified_base 2: mod_base = OTHER; note = 2'-O-methyluridine-3'-phosphorothioate
  modified_base 3: mod_base = OTHER; note = 2'-O-methyladenosine-3'-phosphate
  modified_base 4: mod_base = OTHER; note = 2'-O-methylguanosine-3'-phosphate
  modified_base 5: mod_base = OTHER; note = 2'-O-methyladenosine-3'-phosphate
  modified_base 6: mod_base = OTHER; note = 2'-O-methylcytidine-3'-phosphate
  modified_base 7: mod_base = OTHER; note = 2'-fluorocytidine-3'-phosphate
  modified_base 8: mod_base = OTHER; note = 2'-O-methyluridine-3'-phosphate
  modified_base 9: mod_base = OTHER; note = 2'-fluoroguanosine-3'-phosphate
  modified_base 10: mod_base = OTHER; note = 2'-O-methyluridine-3'-phosphate
  modified_base 11: mod_base = OTHER; note = 2'-O-methyluridine-3'-phosphate
  modified_base 12: mod_base = OTHER; note = 2'-O-methyluridine-3'-phosphate
  modified_base 13: mod_base = OTHER; note = 2'-O-methyluridine-3'-phosphate
  modified_base 14: mod_base = OTHER; note = 2'-O-methylguanosine-3'-phosphate
  modified_base 15: mod_base = OTHER; note = 2'-fluorocytidine-3'-phosphate
  modified_base 16: mod_base = OTHER; note = 2'-O-methyluridine-3'-phosphate
  modified_base 17: mod_base = OTHER; note = 2'-O-methyluridine-3'-phosphate
  modified_base 18: mod_base = OTHER; note = 2'-O-methyluridine-3'-phosphate
  modified_base 19: mod_base = OTHER; note = 2'-O-methyluridine-3'-phosphate
  modified_base 20: mod_base = OTHER; note = 2'-O-methylguanosine-3'-phosphate
  modified_base 21: mod_base = OTHER; note = 2'-O-methyluridine-3'-phosphate N-[tris(GalNAc-alkyl)-amidodecanoyl)]-4-hydroxyprolinol Hyp-(GalNAc-alkyl)3
ctagacctgttttgcttttgt

SEQ ID NO: 278 - RNA, 23 nt, synthetic construct
  source 1..23: mol_type = other RNA; note = Description of Artificial Sequence: Synthetic oligonucleotide
  modified_base 1: mod_base = OTHER; note = 2'-O-methyladenosine-3'-phosphorothioate
  modified_base 2: mod_base = OTHER; note = 2'-fluorocytidine-3'-phosphorothioate
  modified_base 3: mod_base = OTHER; note = 2'-O-methyladenosine-3'-phosphate
  modified_base 4: mod_base = OTHER; note = 2'-fluoroadenosine-3'-phosphate
  modified_base 5: mod_base = OTHER; note = 2'-fluoroadenosine-3'-phosphate
  modified_base 6: mod_base = OTHER; note = 2'-fluoroadenosine-3'-phosphate
  modified_base 7: mod_base = OTHER; note = 2'-O-methylguanosine-3'-phosphate
  modified_base 8: mod_base = OTHER; note = 2'-fluorocytidine-3'-phosphate
  modified_base 9: mod_base = OTHER; note = 2'-O-methyladenosine-3'-phosphate
  modified_base 10: mod_base = OTHER; note = 2'-fluoroadenosine-3'-phosphate
  modified_base 11: mod_base = OTHER; note = 2'-O-methyladenosine-3'-phosphate
  modified_base 12: mod_base = OTHER; note = 2'-fluoroadenosine-3'-phosphate
  modified_base 13: mod_base = OTHER; note = 2'-O-methylcytidine-3'-phosphate
  modified_base 14: mod_base = OTHER; note = 2'-fluoroadenosine-3'-phosphate
  modified_base 15: mod_base = OTHER; note = 2'-O-methylguanosine-3'-phosphate
  modified_base 16: mod_base = OTHER; note = 2'-fluoroguanosine-3'-phosphate
  modified_base 17: mod_base = OTHER; note = 2'-O-methyluridine-3'-phosphate
  modified_base 18: mod_base = OTHER; note = 2'-fluorocytidine-3'-phosphate
  modified_base 19: mod_base = OTHER; note = 2'-O-methyluridine-3'-phosphate
  modified_base 20: mod_base = OTHER; note = 2'-O-methyladenosine-3'-phosphate
  modified_base 21: mod_base = OTHER; note = 2'-O-methylguanosine-3'-phosphorothioate
  modified_base 22: mod_base = OTHER; note = 2'-O-methyladenosine-3'-phosphorothioate
  modified_base 23: mod_base = OTHER; note = 2'-O-methyladenosine-3'-phosphate
acaaaagcaaaacaggtctagaa

SEQ ID NO: 279 - RNA, 21 nt, synthetic construct
  source 1..21: mol_type = other RNA; note = Description of Artificial Sequence: Synthetic oligonucleotide
  modified_base 1: mod_base = OTHER; note = 2'-fluorocytidine-3'-phosphorothioate
  modified_base 2: mod_base = OTHER; note = 2'-O-methyluridine-3'-phosphorothioate
  modified_base 3: mod_base = OTHER; note = 2'-O-methyladenosine-3'-phosphate
  modified_base 4: mod_base = OTHER; note = 2'-O-methylguanosine-3'-phosphate
  modified_base 5: mod_base = OTHER; note = 2'-O-methyladenosine-3'-phosphate
  modified_base 6: mod_base = OTHER; note = 2'-O-methylcytidine-3'-phosphate
  modified_base 7: mod_base = OTHER; note = 2'-fluorocytidine-3'-phosphate
  modified_base 8: mod_base = OTHER; note = 2'-O-methyluridine-3'-phosphate
  modified_base 9: mod_base = OTHER; note = 2'-fluoroguanosine-3'-phosphate
  modified_base 10: mod_base = OTHER; note = 2'-O-methyluridine-3'-phosphate
  modified_base 11: mod_base = OTHER; note = 2'-O-methyluridine-3'-phosphate
  modified_base 12: mod_base = OTHER; note = 2'-O-methyluridine-3'-phosphate
  modified_base 13: mod_base = OTHER; note = 2'-O-methyluridine-3'-phosphate
  modified_base 14: mod_base = OTHER; note = 2'-O-methylguanosine-3'-phosphate
  modified_base 15: mod_base = OTHER; note = 2'-O-methylcytidine-3'-phosphate
  modified_base 16: mod_base = OTHER; note = 2'-O-methyluridine-3'-phosphate
  modified_base 17: mod_base = OTHER; note = 2'-O-methyluridine-3'-phosphate
  modified_base 18: mod_base = OTHER; note = 2'-O-methyluridine-3'-phosphate
  modified_base 19: mod_base = OTHER; note = 2'-O-methyluridine-3'-phosphate
  modified_base 20: mod_base = OTHER; note = 2'-O-methylguanosine-3'-phosphate
  modified_base 21: mod_base = OTHER; note = 2'-O-methyluridine-3'-phosphate N-[tris(GalNAc-alkyl)-amidodecanoyl)]-4-hydroxyprolinol Hyp-(GalNAc-alkyl)3
ctagacctgttttgcttttgt

SEQ ID NO: 280 - RNA, 23 nt, synthetic construct
  source 1..23: mol_type = other RNA; note = Description of Artificial Sequence: Synthetic oligonucleotide
  modified_base 1: mod_base = OTHER; note = 2'-O-methyladenosine-3'-phosphorothioate
  modified_base 2: mod_base = OTHER; note = 2'-fluorocytidine-3'-phosphorothioate
  modified_base 3: mod_base = OTHER; note = 2'-O-methyladenosine-3'-phosphate
  modified_base 4: mod_base = OTHER; note = 2'-fluoroadenosine-3'-phosphate
  modified_base 5: mod_base = OTHER; note = 2'-fluoroadenosine-3'-phosphate
  modified_base 6: mod_base = OTHER; note = 2'-fluoroadenosine-3'-phosphate
  modified_base 7: mod_base = OTHER; note = 2'-O-methylguanosine-3'-phosphate
  modified_base 8: mod_base = OTHER; note = 2'-fluorocytidine-3'-phosphate
  modified_base 9: mod_base = OTHER; note = 2'-O-methyladenosine-3'-phosphate
  modified_base 10: mod_base = OTHER; note = 2'-fluoroadenosine-3'-phosphate
  modified_base 11: mod_base = OTHER; note = 2'-O-methyladenosine-3'-phosphate
  modified_base 12: mod_base = OTHER; note = 2'-fluoroadenosine-3'-phosphate
  modified_base 13: mod_base = OTHER; note = 2'-O-methylcytidine-3'-phosphate
  modified_base 14: mod_base = OTHER; note = 2'-fluoroadenosine-3'-phosphate
  modified_base 15: mod_base = OTHER; note = 2'-O-methylguanosine-3'-phosphate
  modified_base 16: mod_base = OTHER; note = 2'-fluoroguanosine-3'-phosphate
  modified_base 17: mod_base = OTHER; note = 2'-O-methyluridine-3'-phosphate
  modified_base 18: mod_base = OTHER; note = 2'-fluorocytidine-3'-phosphate
  modified_base 19: mod_base = OTHER; note = 2'-O-methyluridine-3'-phosphate
  modified_base 20: mod_base = OTHER; note = 2'-O-methyladenosine-3'-phosphate
  modified_base 21: mod_base = OTHER; note = 2'-O-methylguanosine-3'-phosphorothioate
  modified_base 22: mod_base = OTHER; note = 2'-O-methyladenosine-3'-phosphorothioate
  modified_base 23: mod_base = OTHER; note = 2'-O-methyladenosine-3'-phosphate
acaaaagcaaaacaggtctagaa

SEQ ID NO: 281 - RNA, 21 nt, synthetic construct
  source 1..21: mol_type = other RNA; note = Description of Artificial Sequence: Synthetic oligonucleotide
  modified_base 1: mod_base = OTHER; note = 2'-O-methylcytidine-3'-phosphorothioate
  modified_base 2: mod_base = OTHER; note = 2'-O-methyluridine-3'-phosphorothioate
  modified_base 3: mod_base = OTHER; note = 2'-O-methyladenosine-3'-phosphate
  modified_base 4: mod_base = OTHER; note = 2'-O-methylguanosine-3'-phosphate
  modified_base 5: mod_base = OTHER; note = 2'-O-methyladenosine-3'-phosphate
  modified_base 6: mod_base = OTHER; note = 2'-O-methylcytidine-3'-phosphate
  modified_base 7: mod_base = OTHER; note = 2'-fluorocytidine-3'-phosphate
  modified_base 8: mod_base = OTHER; note = 2'-O-methyluridine-3'-phosphate
  modified_base 9: mod_base = OTHER; note = 2'-fluoroguanosine-3'-phosphate
  modified_base 10: mod_base = OTHER; note = 2'-O-methyluridine-3'-phosphate
  modified_base 11: mod_base = OTHER; note = 2'-O-methyluridine-3'-phosphate
  modified_base 12: mod_base = OTHER; note = 2'-O-methyluridine-3'-phosphate
  modified_base 13: mod_base = OTHER; note = 2'-O-methyluridine-3'-phosphate
  modified_base 14: mod_base = OTHER; note = 2'-O-methylguanosine-3'-phosphate
  modified_base 15: mod_base = OTHER; note = 2'-O-methylcytidine-3'-phosphate
  modified_base 16: mod_base = OTHER; note = 2'-O-methyluridine-3'-phosphate
  modified_base 17: mod_base = OTHER; note = 2'-O-methyluridine-3'-phosphate
  modified_base 18: mod_base = OTHER; note = 2'-O-methyluridine-3'-phosphate
  modified_base 19: mod_base = OTHER; note = 2'-O-methyluridine-3'-phosphate
  modified_base 20: mod_base = OTHER; note = 2'-O-methylguanosine-3'-phosphate
  modified_base 21: mod_base = OTHER; note = 2'-O-methyluridine-3'-phosphate N-[tris(GalNAc-alkyl)-amidodecanoyl)]-4-hydroxyprolinol Hyp-(GalNAc-alkyl)3
ctagacctgttttgcttttgt

SEQ ID NO: 282 - RNA, 23 nt, synthetic construct
  source 1..23: mol_type = other RNA; note = Description of Artificial Sequence: Synthetic oligonucleotide
  modified_base 1: mod_base = OTHER; note = 2'-O-methyladenosine-3'-phosphorothioate
  modified_base 2: mod_base = OTHER; note = 2'-fluorocytidine-3'-phosphorothioate
  modified_base 3: mod_base = OTHER; note = 2'-O-methyladenosine-3'-phosphate
  modified_base 4: mod_base = OTHER; note = 2'-fluoroadenosine-3'-phosphate
  modified_base 5: mod_base = OTHER; note = 2'-fluoroadenosine-3'-phosphate
  modified_base 6: mod_base = OTHER; note = 2'-fluoroadenosine-3'-phosphate
  modified_base 7: mod_base = OTHER; note = 2'-O-methylguanosine-3'-phosphate
  modified_base 8: mod_base = OTHER; note = 2'-fluorocytidine-3'-phosphate
  modified_base 9: mod_base = OTHER; note = 2'-O-methyladenosine-3'-phosphate
  modified_base 10: mod_base = OTHER; note = 2'-fluoroadenosine-3'-phosphate
  modified_base 11: mod_base = OTHER; note = 2'-O-methyladenosine-3'-phosphate
  modified_base 12: mod_base = OTHER; note = 2'-fluoroadenosine-3'-phosphate
  modified_base 13: mod_base = OTHER; note = 2'-O-methylcytidine-3'-phosphate
  modified_base 14: mod_base = OTHER; note = 2'-fluoroadenosine-3'-phosphate
  modified_base 15: mod_base = OTHER; note = 2'-O-methylguanosine-3'-phosphate
  modified_base 16: mod_base = OTHER; note = 2'-fluoroguanosine-3'-phosphate
  modified_base 17: mod_base = OTHER; note = 2'-O-methyluridine-3'-phosphate
  modified_base 18: mod_base = OTHER; note = 2'-fluorocytidine-3'-phosphate
  modified_base 19: mod_base = OTHER; note = 2'-O-methyluridine-3'-phosphate
  modified_base 20: mod_base = OTHER; note = 2'-O-methyladenosine-3'-phosphate
  modified_base 21: mod_base = OTHER; note = 2'-O-methylguanosine-3'-phosphorothioate
  modified_base 22: mod_base = OTHER; note = 2'-O-methyladenosine-3'-phosphorothioate
  modified_base 23: mod_base = OTHER; note = 2'-O-methyladenosine-3'-phosphate
acaaaagcaaaacaggtctagaa

SEQ ID NO: 283 - RNA, 21 nt, synthetic construct
  source 1..21: mol_type = other RNA; note = Description of Artificial Sequence: Synthetic oligonucleotide
  modified_base 1: mod_base = OTHER; note = 2'-fluorocytidine-3'-phosphorothioate
  modified_base 2: mod_base = OTHER; note = 2'-O-methyluridine-3'-phosphorothioate
  modified_base 3: mod_base = OTHER; note = 2'-fluoroadenosine-3'-phosphate
  modified_base 4: mod_base = OTHER; note = 2'-O-methylguanosine-3'-phosphate
  modified_base 5: mod_base = OTHER; note = 2'-fluoroadenosine-3'-phosphate
  modified_base 6: mod_base = OTHER; note = 2'-O-methylcytidine-3'-phosphate
  modified_base 7: mod_base = OTHER; note = 2'-fluorocytidine-3'-phosphate
  modified_base 8: mod_base = OTHER; note = 2'-O-methyluridine-3'-phosphate
  modified_base 9: mod_base = OTHER; note = 2'-fluoroguanosine-3'-phosphate
  modified_base 10: mod_base = OTHER; note = 2'-fluorouridine-3'-phosphate
  modified_base 11: mod_base = OTHER; note = 2'-fluorouridine-3'-phosphate
  modified_base 12: mod_base = OTHER; note = 2'-O-methyluridine-3'-phosphate
  modified_base 13: mod_base = OTHER; note = 2'-fluorouridine-3'-phosphate
  modified_base 14: mod_base = OTHER; note = 2'-O-methylguanosine-3'-phosphate
  modified_base 15: mod_base = OTHER; note = 2'-fluorocytidine-3'-phosphate
  modified_base 16: mod_base = OTHER; note = 2'-O-methyluridine-3'-phosphate
  modified_base 17: mod_base = OTHER; note = 2'-fluorouridine-3'-phosphate
  modified_base 18: mod_base = OTHER; note = 2'-O-methyluridine-3'-phosphate
  modified_base 19: mod_base = OTHER; note = 2'-fluorouridine-3'-phosphate
  modified_base 20: mod_base = OTHER; note = 2'-O-methylguanosine-3'-phosphorothioate
  modified_base 21: mod_base = OTHER; note = 2'-fluorouridine-3'-phosphate N-[tris(GalNAc-alkyl)-amidodecanoyl)]-4-hydroxyprolinol Hyp-(GalNAc-alkyl)3
ctagacctgttttgcttttgt

SEQ ID NO: 284 - RNA, 23 nt, synthetic construct
  source 1..23: mol_type = other RNA; note = Description of Artificial Sequence: Synthetic oligonucleotide
  modified_base 1: mod_base = OTHER; note = 2'-O-methyladenosine-3'-phosphorothioate
  modified_base 2: mod_base = OTHER; note = 2'-fluorocytidine-3'-phosphorothioate
  modified_base 3: mod_base = OTHER; note = 2'-O-methyladenosine-3'-phosphate
  modified_base 4: mod_base = OTHER; note = 2'-fluoroadenosine-3'-phosphate
  modified_base 5: mod_base = OTHER; note = 2'-O-methyladenosine-3'-phosphate
  modified_base 6: mod_base = OTHER; note = 2'-fluoroadenosine-3'-phosphate
  modified_base 7: mod_base = OTHER; note = 2'-O-methylguanosine-3'-phosphate
  modified_base 8: mod_base = OTHER; note = 2'-fluorocytidine-3'-phosphate
  modified_base 9: mod_base = OTHER; note = 2'-O-methyladenosine-3'-phosphate
  modified_base 10: mod_base = OTHER; note = 2'-fluoroadenosine-3'-phosphate
  modified_base 11: mod_base = OTHER; note = 2'-O-methyladenosine-3'-phosphate
  modified_base 12: mod_base = OTHER; note = 2'-O-methyladenosine-3'-phosphate
  modified_base 13: mod_base = OTHER; note = 2'-O-methylcytidine-3'-phosphate
  modified_base 14: mod_base = OTHER; note = 2'-fluoroadenosine-3'-phosphate
  modified_base 15: mod_base = OTHER; note = 2'-O-methylguanosine-3'-phosphate
  modified_base 16: mod_base = OTHER; note = 2'-fluoroguanosine-3'-phosphate
  modified_base 17: mod_base = OTHER; note = 2'-O-methyluridine-3'-phosphate
  modified_base 18: mod_base = OTHER; note = 2'-fluorocytidine-3'-phosphate
  modified_base 19: mod_base = OTHER; note = 2'-O-methyluridine-3'-phosphate
  modified_base 20: mod_base = OTHER; note = 2'-fluoroadenosine-3'-phosphate
  modified_base 21: mod_base = OTHER; note = 2'-O-methylguanosine-3'-phosphorothioate
  modified_base 22: mod_base = OTHER; note = 2'-O-methyladenosine-3'-phosphorothioate
  modified_base 23: mod_base = OTHER; note = 2'-O-methyladenosine-3'-phosphate
acaaaagcaaaacaggtctagaa

SEQ ID NO: 285 - RNA, 21 nt, synthetic construct
  source 1..21: mol_type = other RNA; note = Description of Artificial Sequence: Synthetic oligonucleotide
  modified_base 1: mod_base = OTHER; note = 2'-fluorocytidine-3'-phosphorothioate
  modified_base 2: mod_base = OTHER; note = 2'-O-methyluridine-3'-phosphorothioate
  modified_base 3: mod_base = OTHER; note = 2'-fluoroadenosine-3'-phosphate
  modified_base 4: mod_base = OTHER; note = 2'-O-methylguanosine-3'-phosphate
  modified_base 5: mod_base = OTHER; note = 2'-fluoroadenosine-3'-phosphate
  modified_base 6: mod_base = OTHER; note = 2'-O-methylcytidine-3'-phosphate
  modified_base 7: mod_base = OTHER; note = 2'-fluorocytidine-3'-phosphate
  modified_base 8: mod_base = OTHER; note = 2'-O-methyluridine-3'-phosphate
  modified_base 9: mod_base = OTHER; note = 2'-fluoroguanosine-3'-phosphate
  modified_base 10: mod_base = OTHER; note = 2'-fluorouridine-3'-phosphate
  modified_base 11: mod_base = OTHER; note = 2'-fluorouridine-3'-phosphate
  modified_base 12: mod_base = OTHER; note = 2'-O-methyluridine-3'-phosphate
  modified_base 13: mod_base = OTHER; note = 2'-fluorouridine-3'-phosphate
  modified_base 14: mod_base = OTHER; note = 2'-O-methylguanosine-3'-phosphate
  modified_base 15: mod_base = OTHER; note = 2'-fluorocytidine-3'-phosphate
  modified_base 16: mod_base = OTHER; note = 2'-O-methyluridine-3'-phosphate
  modified_base 17: mod_base = OTHER; note = 2'-fluorouridine-3'-phosphate
  modified_base 18: mod_base = OTHER; note = 2'-O-methyluridine-3'-phosphate
  modified_base 19: mod_base = OTHER; note = 2'-fluorouridine-3'-phosphorothioate
  modified_base 20: mod_base = OTHER; note = 2'-O-methylguanosine-3'-phosphorothioate
  modified_base 21: mod_base = OTHER; note = 2'-fluorouridine-3'-phosphate N-[tris(GalNAc-alkyl)-amidodecanoyl)]-4-hydroxyprolinol Hyp-(GalNAc-alkyl)3
ctagacctgttttgcttttgt

SEQ ID NO: 286 - RNA, 23 nt, synthetic construct
  source 1..23: mol_type = other RNA; note = Description of Artificial Sequence: Synthetic oligonucleotide
  modified_base 1: mod_base = OTHER; note = 2'-O-methyladenosine-3'-phosphorothioate
  modified_base 2: mod_base = OTHER; note = 2'-fluorocytidine-3'-phosphorothioate
  modified_base 3: mod_base = OTHER; note = 2'-O-methyladenosine-3'-phosphate
  modified_base 4: mod_base = OTHER; note = 2'-fluoroadenosine-3'-phosphate
  modified_base 5: mod_base = OTHER; note = 2'-O-methyladenosine-3'-phosphate
  modified_base 6: mod_base = OTHER; note = 2'-fluoroadenosine-3'-phosphate
  modified_base 7: mod_base = OTHER; note = 2'-O-methylguanosine-3'-phosphate
  modified_base 8: mod_base = OTHER; note = 2'-fluorocytidine-3'-phosphate
  modified_base 9: mod_base = OTHER; note = 2'-O-methyladenosine-3'-phosphate
  modified_base 10: mod_base = OTHER; note = 2'-fluoroadenosine-3'-phosphate
  modified_base 11: mod_base = OTHER; note = 2'-O-methyladenosine-3'-phosphate
  modified_base 12: mod_base = OTHER; note = 2'-O-methyladenosine-3'-phosphate
  modified_base 13: mod_base = OTHER; note = 2'-O-methylcytidine-3'-phosphate
  modified_base 14: mod_base = OTHER; note = 2'-fluoroadenosine-3'-phosphate
  modified_base 15: mod_base = OTHER; note = 2'-O-methylguanosine-3'-phosphate
  modified_base 16: mod_base = OTHER; note = 2'-fluoroguanosine-3'-phosphate
  modified_base 17: mod_base = OTHER; note = 2'-O-methyluridine-3'-phosphate
  modified_base 18: mod_base = OTHER; note = 2'-fluorocytidine-3'-phosphate
  modified_base 19: mod_base = OTHER; note = 2'-O-methyluridine-3'-phosphate
  modified_base 20: mod_base = OTHER; note = 2'-fluoroadenosine-3'-phosphate
  modified_base 21: mod_base = OTHER; note = 2'-O-methylguanosine-3'-phosphorothioate
  modified_base 22: mod_base = OTHER; note = 2'-O-methyladenosine-3'-phosphorothioate
  modified_base 23: mod_base = OTHER; note = 2'-O-methyladenosine-3'-phosphate
acaaaagcaaaacaggtctagaa

SEQ ID NO: 287 - RNA, 21 nt, synthetic construct
  source 1..21: mol_type = other RNA; note = Description of Artificial Sequence: Synthetic oligonucleotide
  modified_base 1: mod_base = OTHER; note = 2'-fluorocytidine-3'-phosphorothioate
  modified_base 2: mod_base = OTHER; note = 2'-O-methyluridine-3'-phosphorothioate
  modified_base 3: mod_base = OTHER; note = 2'-fluoroadenosine-3'-phosphate
  modified_base 4: mod_base = OTHER; note = 2'-O-methylguanosine-3'-phosphate
  modified_base 5: mod_base = OTHER; note = 2'-fluoroadenosine-3'-phosphate
  modified_base 6: mod_base = OTHER; note = 2'-O-methylcytidine-3'-phosphate
  modified_base 7: mod_base = OTHER; note = 2'-fluorocytidine-3'-phosphate
  modified_base 8: mod_base = OTHER; note = 2'-O-methyluridine-3'-phosphate
  modified_base 9: mod_base = OTHER; note = 2'-fluoroguanosine-3'-phosphate
  modified_base 10: mod_base = OTHER; note = 2'-fluorouridine-3'-phosphate
  modified_base 11: mod_base = OTHER; note = 2'-fluorouridine-3'-phosphate
  modified_base 12: mod_base = OTHER; note = 2'-O-methyluridine-3'-phosphate
  modified_base 13: mod_base = OTHER; note = 2'-fluorouridine-3'-phosphate
  modified_base 14: mod_base = OTHER; note = 2'-O-methylguanosine-3'-phosphate
  modified_base 15: mod_base = OTHER; note = 2'-fluorocytidine-3'-phosphorothioate
  modified_base 16: mod_base = OTHER; note = 2'-O-methyluridine-3'-phosphate
  modified_base 17: mod_base = OTHER; note = 2'-fluorouridine-3'-phosphorothioate
  modified_base 18: mod_base = OTHER; note = 2'-O-methyluridine-3'-phosphate
  modified_base 19: mod_base = OTHER; note = 2'-fluorouridine-3'-phosphorothioate
  modified_base 20: mod_base = OTHER; note = 2'-O-methylguanosine-3'-phosphorothioate
  modified_base 21: mod_base = OTHER; note = 2'-fluorouridine-3'-phosphate N-[tris(GalNAc-alkyl)-amidodecanoyl)]-4-hydroxyprolinol Hyp-(GalNAc-alkyl)3
ctagacctgttttgcttttgt

SEQ ID NO: 288 - RNA, 23 nt, synthetic construct
  source 1..23: mol_type = other RNA; note = Description of Artificial Sequence: Synthetic oligonucleotide
  modified_base 1: mod_base = OTHER; note = 2'-O-methyladenosine-3'-phosphorothioate
  modified_base 2: mod_base = OTHER; note = 2'-fluorocytidine-3'-phosphorothioate
  modified_base 3: mod_base = OTHER; note = 2'-O-methyladenosine-3'-phosphate
  modified_base 4: mod_base = OTHER; note = 2'-fluoroadenosine-3'-phosphate
  modified_base 5: mod_base = OTHER; note = 2'-O-methyladenosine-3'-phosphate
  modified_base 6: mod_base = OTHER; note = 2'-fluoroadenosine-3'-phosphate
  modified_base 7: mod_base = OTHER; note = 2'-O-methylguanosine-3'-phosphate
  modified_base 8: mod_base = OTHER; note = 2'-fluorocytidine-3'-phosphate
  modified_base 9: mod_base = OTHER; note = 2'-O-methyladenosine-3'-phosphate
  modified_base 10: mod_base = OTHER; note = 2'-fluoroadenosine-3'-phosphate
  modified_base 11: mod_base = OTHER; note = 2'-O-methyladenosine-3'-phosphate
  modified_base 12: mod_base = OTHER; note = 2'-O-methyladenosine-3'-phosphate
  modified_base 13: mod_base = OTHER; note = 2'-O-methylcytidine-3'-phosphate
  modified_base 14: mod_base = OTHER; note = 2'-fluoroadenosine-3'-phosphate
  modified_base 15: mod_base = OTHER; note = 2'-O-methylguanosine-3'-phosphate
  modified_base 16: mod_base = OTHER; note = 2'-fluoroguanosine-3'-phosphate
  modified_base 17: mod_base = OTHER; note = 2'-O-methyluridine-3'-phosphate
  modified_base 18: mod_base = OTHER; note = 2'-fluorocytidine-3'-phosphate
  modified_base 19: mod_base = OTHER; note = 2'-O-methyluridine-3'-phosphate
  modified_base 20: mod_base = OTHER; note = 2'-fluoroadenosine-3'-phosphate
  modified_base 21: mod_base = OTHER; note = 2'-O-methylguanosine-3'-phosphorothioate
  modified_base 22: mod_base = OTHER; note = 2'-O-methyladenosine-3'-phosphorothioate
  modified_base 23: mod_base = OTHER; note = 2'-O-methyladenosine-3'-phosphate
acaaaagcaaaacaggtctagaa

SEQ ID NO: 289 - RNA, 21 nt, synthetic construct
  source 1..21: mol_type = other RNA; note = Description of Artificial Sequence: Synthetic oligonucleotide
  modified_base 1: mod_base = OTHER; note = 2'-fluorocytidine-3'-phosphorothioate
  modified_base 2: mod_base = OTHER; note = 2'-O-methyluridine-3'-phosphorothioate
  modified_base 3: mod_base = OTHER; note = 2'-fluoroadenosine-3'-phosphate
  modified_base 4: mod_base = OTHER; note = 2'-O-methylguanosine-3'-phosphate
  modified_base 5: mod_base = OTHER; note = 2'-fluoroadenosine-3'-phosphate
  modified_base 6: mod_base = OTHER; note = 2'-O-methylcytidine-3'-phosphate
  modified_base 7: mod_base = OTHER; note = 2'-fluorocytidine-3'-phosphate
  modified_base 8: mod_base = OTHER; note = 2'-O-methyluridine-3'-phosphate
  modified_base 9: mod_base = OTHER; note = 2'-fluoroguanosine-3'-phosphate
  modified_base 10: mod_base = OTHER; note = 2'-fluorouridine-3'-phosphate
  modified_base 11: mod_base = OTHER; note = 2'-fluorouridine-3'-phosphate
  modified_base 12: mod_base = OTHER; note = 2'-O-methyluridine-3'-phosphate
  modified_base 13: mod_base = OTHER; note = 2'-fluorouridine-3'-phosphate
  modified_base 14: mod_base = OTHER; note = 2'-O-methylguanosine-3'-phosphate
  modified_base 15: mod_base = OTHER; note = 2'-fluorocytidine-3'-phosphorothioate
  modified_base 16: mod_base = OTHER; note = 2'-O-methyluridine-3'-phosphate
  modified_base 17: mod_base = OTHER; note = 2'-fluorouridine-3'-phosphorothioate
  modified_base 18: mod_base = OTHER; note = 2'-O-methyluridine-3'-phosphate
  modified_base 19: mod_base = OTHER; note = 2'-fluorouridine-3'-phosphorothioate
  modified_base 20: mod_base = OTHER; note = 2'-O-methylguanosine-3'-phosphorothioate
  modified_base 21: mod_base = OTHER; note = 2'-fluorouridine-3'-phosphorothioate N-[tris(GalNAc-alkyl)-amidodecanoyl)]-4-hydroxyprolinol Hyp-(GalNAc-alkyl)3
ctagacctgttttgcttttgt

SEQ ID NO: 290 - RNA, 23 nt, synthetic construct
  source 1..23: mol_type = other RNA; note = Description of Artificial Sequence: Synthetic oligonucleotide
  modified_base 1: mod_base = OTHER; note = 2'-O-methyladenosine-3'-phosphorothioate
  modified_base 2: mod_base = OTHER; note = 2'-fluorocytidine-3'-phosphorothioate
  modified_base 3: mod_base = OTHER; note = 2'-O-methyladenosine-3'-phosphate
  modified_base 4: mod_base = OTHER; note = 2'-fluoroadenosine-3'-phosphate
  modified_base 5: mod_base = OTHER; note = 2'-O-methyladenosine-3'-phosphate
  modified_base 6: mod_base = OTHER; note = 2'-fluoroadenosine-3'-phosphate
  modified_base 7: mod_base = OTHER; note = 2'-O-methylguanosine-3'-phosphate
  modified_base 8: mod_base = OTHER; note = 2'-fluorocytidine-3'-phosphate
  modified_base 9: mod_base = OTHER; note = 2'-O-methyladenosine-3'-phosphate
  modified_base 10: mod_base = OTHER; note = 2'-fluoroadenosine-3'-phosphate
  modified_base 11: mod_base = OTHER; note = 2'-O-methyladenosine-3'-phosphate
  modified_base 12: mod_base = OTHER; note = 2'-O-methyladenosine-3'-phosphate
  modified_base 13: mod_base = OTHER; note = 2'-O-methylcytidine-3'-phosphate
  modified_base 14: mod_base = OTHER; note = 2'-fluoroadenosine-3'-phosphate
  modified_base 15: mod_base = OTHER; note = 2'-O-methylguanosine-3'-phosphate
  modified_base 16: mod_base = OTHER; note = 2'-fluoroguanosine-3'-phosphate
  modified_base 17: mod_base = OTHER; note = 2'-O-methyluridine-3'-phosphate
  modified_base 18: mod_base = OTHER; note = 2'-fluorocytidine-3'-phosphate
  modified_base 19: mod_base = OTHER; note = 2'-O-methyluridine-3'-phosphate
  modified_base 20: mod_base = OTHER; note = 2'-fluoroadenosine-3'-phosphate
  modified_base 21: mod_base = OTHER; note = 2'-O-methylguanosine-3'-phosphorothioate
  modified_base 22: mod_base = OTHER; note = 2'-O-methyladenosine-3'-phosphorothioate
  modified_base 23: mod_base = OTHER; note = 2'-O-methyladenosine-3'-phosphate
acaaaagcaaaacaggtctagaa

SEQ ID NO: 291 - RNA, 21 nt, synthetic construct
  source 1..21: mol_type = other RNA; note = Description of Artificial Sequence: Synthetic oligonucleotide
  modified_base 1: mod_base = OTHER; note = 2'-fluorocytidine-3'-phosphorothioate
  modified_base 2: mod_base = OTHER; note = 2'-O-methyluridine-3'-phosphorothioate
  modified_base 3: mod_base = OTHER; note = 2'-fluoroadenosine-3'-phosphate
  modified_base 4: mod_base = OTHER; note = 2'-O-methylguanosine-3'-phosphate
  modified_base 5: mod_base = OTHER; note = 2'-fluoroadenosine-3'-phosphate
  modified_base 6: mod_base = OTHER; note = 2'-O-methylcytidine-3'-phosphate
  modified_base 7: mod_base = OTHER; note = 2'-fluorocytidine-3'-phosphate
  modified_base 8: mod_base = OTHER; note = 2'-O-methyluridine-3'-phosphate
  modified_base 9: mod_base = OTHER; note = 2'-fluoroguanosine-3'-phosphate
  modified_base 10: mod_base = OTHER; note = 2'-fluorouridine-3'-phosphate
  modified_base 11: mod_base = OTHER; note = 2'-fluorouridine-3'-phosphate
  modified_base 12: mod_base = OTHER; note = 2'-O-methyluridine-3'-phosphate
  modified_base 13: mod_base = OTHER; note = 2'-fluorouridine-3'-phosphate
  modified_base 14: mod_base = OTHER; note = 2'-O-methylguanosine-3'-phosphate
  modified_base 15: mod_base = OTHER; note = 2'-fluorocytidine-3'-phosphate
  modified_base 16: mod_base = OTHER; note = 2'-O-methyluridine-3'-phosphate
  modified_base 17: mod_base = OTHER; note = 2'-fluorouridine-3'-phosphate
  modified_base 18: mod_base = OTHER; note = 2'-O-methyluridine-3'-phosphate
  modified_base 19: mod_base = OTHER; note = 2'-fluorouridine-3'-phosphorothioate
  modified_base 20: mod_base = OTHER; note = 2'-O-methylguanosine-3'-phosphorothioate
  modified_base 21: mod_base = OTHER; note = 2'-fluorouridine-3'-phosphorothioate N-[tris(GalNAc-alkyl)-amidodecanoyl)]-4-hydroxyprolinol Hyp-(GalNAc-alkyl)3
ctagacctgttttgcttttgt

SEQ ID NO: 292 - RNA, 23 nt, synthetic construct
  source 1..23: mol_type = other RNA; note = Description of Artificial Sequence: Synthetic oligonucleotide
  modified_base 1: mod_base = OTHER; note = 2'-O-methyladenosine-3'-phosphorothioate
  modified_base 2: mod_base = OTHER; note = 2'-fluorocytidine-3'-phosphorothioate
  modified_base 3: mod_base = OTHER; note = 2'-O-methyladenosine-3'-phosphate
  modified_base 4: mod_base = OTHER; note = 2'-fluoroadenosine-3'-phosphate
  modified_base 5: mod_base = OTHER; note = 2'-O-methyladenosine-3'-phosphate
  modified_base 6: mod_base = OTHER; note = 2'-fluoroadenosine-3'-phosphate
  modified_base 7: mod_base = OTHER; note = 2'-O-methylguanosine-3'-phosphate
  modified_base 8: mod_base = OTHER; note = 2'-fluorocytidine-3'-phosphate
  modified_base 9: mod_base = OTHER; note = 2'-O-methyladenosine-3'-phosphate
  modified_base 10: mod_base = OTHER; note = 2'-fluoroadenosine-3'-phosphate
  modified_base 11: mod_base = OTHER; note = 2'-O-methyladenosine-3'-phosphate
  modified_base 12: mod_base = OTHER; note = 2'-O-methyladenosine-3'-phosphate
  modified_base 13: mod_base = OTHER; note = 2'-O-methylcytidine-3'-phosphate
  modified_base 14: mod_base = OTHER; note = 2'-fluoroadenosine-3'-phosphate
  modified_base 15: mod_base = OTHER; note = 2'-O-methylguanosine-3'-phosphate
  modified_base 16: mod_base = OTHER; note = 2'-fluoroguanosine-3'-phosphate
  modified_base 17: mod_base = OTHER; note = 2'-O-methyluridine-3'-phosphate
  modified_base 18: mod_base = OTHER; note = 2'-fluorocytidine-3'-phosphate
  modified_base 19: mod_base = OTHER; note = 2'-O-methyluridine-3'-phosphate
  modified_base 20: mod_base = OTHER; note = 2'-fluoroadenosine-3'-phosphate
  modified_base 21: mod_base = OTHER; note = 2'-O-methylguanosine-3'-phosphorothioate
  modified_base 22: mod_base = OTHER; note = 2'-O-methyladenosine-3'-phosphorothioate
  modified_base 23: mod_base = OTHER; note = 2'-O-methyladenosine-3'-phosphate
acaaaagcaaaacaggtctagaa

SEQ ID NO: 293 - RNA, 21 nt, synthetic construct
  source 1..21: mol_type = other RNA; note = Description of Artificial Sequence: Synthetic oligonucleotide
  modified_base 1: mod_base = OTHER; note = 2'-fluorocytidine-3'-phosphorothioate
  modified_base 2: mod_base = OTHER; note = 2'-O-methyluridine-3'-phosphorothioate
  modified_base 3: mod_base = OTHER; note = 2'-fluoroadenosine-3'-phosphate
  modified_base 4: mod_base = OTHER; note = 2'-O-methylguanosine-3'-phosphate
  modified_base 5: mod_base = OTHER; note = 2'-fluoroadenosine-3'-phosphate
  modified_base 6: mod_base = OTHER; note = 2'-O-methylcytidine-3'-phosphate
  modified_base 7: mod_base = OTHER; note = 2'-fluorocytidine-3'-phosphate
  modified_base 8: mod_base = OTHER; note = 2'-O-methyluridine-3'-phosphate
  modified_base 9: mod_base = OTHER; note = 2'-fluoroguanosine-3'-phosphate
  modified_base 10: mod_base = OTHER; note = 2'-fluorouridine-3'-phosphate
  modified_base 11: mod_base = OTHER; note = 2'-fluorouridine-3'-phosphate
  modified_base 12: mod_base = OTHER; note = 2'-O-methyluridine-3'-phosphate
  modified_base 13: mod_base = OTHER; note = 2'-fluorouridine-3'-phosphate
  modified_base 14: mod_base = OTHER; note = 2'-O-methylguanosine-3'-phosphate
  modified_base 15: mod_base = OTHER; note = 2'-fluorocytidine-3'-phosphate
  modified_base 16: mod_base = OTHER; note = 2'-O-methyluridine-3'-phosphate
  modified_base 17: mod_base = OTHER; note = 2'-fluorouridine-3'-phosphate
  modified_base 18: mod_base = OTHER; note = 2'-O-methyluridine-3'-phosphate
  modified_base 19: mod_base = OTHER; note = 2'-fluorouridine-3'-phosphate
  modified_base 20: mod_base = OTHER; note = 2'-O-methylguanosine-3'-phosphate
  modified_base 21: mod_base = OTHER; note = 2'-fluorouridine-3'-phosphorothioate N-[tris(GalNAc-alkyl)-amidodecanoyl)]-4-hydroxyprolinol Hyp-(GalNAc-alkyl)3
ctagacctgttttgcttttgt

SEQ ID NO: 294 - RNA, 23 nt, synthetic construct
  source 1..23: mol_type = other RNA; note = Description of Artificial Sequence: Synthetic oligonucleotide
  modified_base 1: mod_base = OTHER; note = 2'-O-methyladenosine-3'-phosphorothioate
  modified_base 2: mod_base = OTHER; note = 2'-fluorocytidine-3'-phosphorothioate
  modified_base 3: mod_base = OTHER; note = 2'-O-methyladenosine-3'-phosphate
  modified_base 4: mod_base = OTHER; note = 2'-fluoroadenosine-3'-phosphate
  modified_base 5: mod_base = OTHER; note = 2'-O-methyladenosine-3'-phosphate
  modified_base 6: mod_base = OTHER; note = 2'-fluoroadenosine-3'-phosphate
  modified_base 7: mod_base = OTHER; note = 2'-O-methylguanosine-3'-phosphate
  modified_base 8: mod_base = OTHER; note = 2'-fluorocytidine-3'-phosphate
  modified_base 9: mod_base = OTHER; note = 2'-O-methyladenosine-3'-phosphate
  modified_base 10: mod_base = OTHER; note = 2'-fluoroadenosine-3'-phosphate
  modified_base 11: mod_base = OTHER; note = 2'-O-methyladenosine-3'-phosphate
  modified_base 12: mod_base = OTHER; note = 2'-O-methyladenosine-3'-phosphate
  modified_base 13: mod_base = OTHER; note = 2'-O-methylcytidine-3'-phosphate
  modified_base 14: mod_base = OTHER; note = 2'-fluoroadenosine-3'-phosphate
  modified_base 15: mod_base = OTHER; note = 2'-O-methylguanosine-3'-phosphate
  modified_base 16: mod_base = OTHER; note = 2'-fluoroguanosine-3'-phosphate
  modified_base 17: mod_base = OTHER; note = 2'-O-methyluridine-3'-phosphate
  modified_base 18: mod_base = OTHER; note = 2'-fluorocytidine-3'-phosphate
  modified_base 19: mod_base = OTHER; note = 2'-O-methyluridine-3'-phosphate
  modified_base 20: mod_base = OTHER; note = 2'-fluoroadenosine-3'-phosphate
  modified_base 21: mod_base = OTHER; note = 2'-O-methylguanosine-3'-phosphorothioate
  modified_base 22: mod_base = OTHER; note = 2'-O-methyladenosine-3'-phosphorothioate
  modified_base 23: mod_base = OTHER; note = 2'-O-methyladenosine-3'-phosphate
acaaaagcaaaacaggtctagaa

SEQ ID NO: 295 - RNA, 21 nt, synthetic construct
  source 1..21: mol_type = other RNA; note = Description of Artificial Sequence: Synthetic oligonucleotide
  modified_base 1: mod_base = OTHER; note = 2'-fluorocytidine-3'-phosphorothioate
  modified_base 2: mod_base = OTHER; note = 2'-O-methyluridine-3'-phosphorothioate
  modified_base 3: mod_base = OTHER; note = 2'-fluoroadenosine-3'-phosphate
  modified_base 4: mod_base = OTHER; note = 2'-O-methylguanosine-3'-phosphate
  modified_base 5: mod_base = OTHER; note = 2'-fluoroadenosine-3'-phosphate
  modified_base 6: mod_base = OTHER; note = 2'-O-methylcytidine-3'-phosphate
  modified_base 7: mod_base = OTHER; note = 2'-fluorocytidine-3'-phosphate
  modified_base 8: mod_base = OTHER; note = 2'-O-methyluridine-3'-phosphate
  modified_base 9: mod_base = OTHER; note = 2'-fluoroguanosine-3'-phosphate
  modified_base 10: mod_base = OTHER; note = 2'-fluorouridine-3'-phosphate
  modified_base 11: mod_base = OTHER; note = 2'-fluorouridine-3'-phosphate
  modified_base 12: mod_base = OTHER; note = 2'-O-methyluridine-3'-phosphate
  modified_base 13: mod_base = OTHER; note = 2'-O-methyluridine-3'-phosphate
  modified_base 14: mod_base = OTHER; note = 2'-O-methylguanosine-3'-phosphate
  modified_base 15: mod_base = OTHER; note = 2'-fluorocytidine-3'-phosphate
  modified_base 16: mod_base = OTHER; note = 2'-O-methyluridine-3'-phosphate
  modified_base 17: mod_base = OTHER; note = 2'-O-methyluridine-3'-phosphate
  modified_base 18: mod_base = OTHER; note = 2'-O-methyluridine-3'-phosphate
  modified_base 19: mod_base = OTHER; note = 2'-O-methyluridine-3'-phosphate
  modified_base 20: mod_base = OTHER; note = 2'-O-methylguanosine-3'-phosphorothioate
  modified_base 21: mod_base = OTHER; note = 2'-O-methyluridine-3'-phosphate N-[tris(GalNAc-alkyl)-amidodecanoyl)]-4-hydroxyprolinol Hyp-(GalNAc-alkyl)3
ctagacctgttttgcttttgt

SEQ ID NO: 296 - RNA, 23 nt, synthetic construct
  source 1..23: mol_type = other RNA; note = Description of Artificial Sequence: Synthetic oligonucleotide
  modified_base 1: mod_base = OTHER; note = 2'-O-methyladenosine-3'-phosphorothioate
  modified_base 2: mod_base = OTHER; note = 2'-fluorocytidine-3'-phosphorothioate
  modified_base 3: mod_base = OTHER; note = 2'-O-methyladenosine-3'-phosphate
  modified_base 4: mod_base = OTHER; note = 2'-fluoroadenosine-3'-phosphate
  modified_base 5: mod_base = OTHER; note = 2'-O-methyladenosine-3'-phosphate
  modified_base 6: mod_base = OTHER; note = 2'-fluoroadenosine-3'-phosphate
  modified_base 7: mod_base = OTHER; note = 2'-O-methylguanosine-3'-phosphate
  modified_base 8: mod_base = OTHER; note = 2'-fluorocytidine-3'-phosphate
  modified_base 9: mod_base = OTHER; note = 2'-O-methyladenosine-3'-phosphate
  modified_base 10: mod_base = OTHER; note = 2'-fluoroadenosine-3'-phosphate
  modified_base 11: mod_base = OTHER; note = 2'-O-methyladenosine-3'-phosphate
  modified_base 12: mod_base = OTHER; note = 2'-O-methyladenosine-3'-phosphate
  modified_base 13: mod_base = OTHER; note = 2'-O-methylcytidine-3'-phosphate
  modified_base 14: mod_base = OTHER; note = 2'-fluoroadenosine-3'-phosphate
  modified_base 15: mod_base = OTHER; note = 2'-O-methylguanosine-3'-phosphate
  modified_base 16: mod_base = OTHER; note = 2'-fluoroguanosine-3'-phosphate
  modified_base 17: mod_base = OTHER; note = 2'-O-methyluridine-3'-phosphate
  modified_base 18: mod_base = OTHER; note = 2'-fluorocytidine-3'-phosphate
  modified_base 19: mod_base = OTHER; note = 2'-O-methyluridine-3'-phosphate
  modified_base 20: mod_base = OTHER; note = 2'-fluoroadenosine-3'-phosphate
  modified_base 21: mod_base = OTHER; note = 2'-O-methylguanosine-3'-phosphorothioate
  modified_base 22: mod_base = OTHER; note = 2'-O-methyladenosine-3'-phosphorothioate
  modified_base 23: mod_base = OTHER; note = 2'-O-methyladenosine-3'-phosphate
acaaaagcaaaacaggtctagaa

SEQ ID NO: 297 - RNA, 21 nt, synthetic construct
  source 1..21: mol_type = other RNA; note = Description of Artificial Sequence: Synthetic oligonucleotide
  modified_base 1: mod_base = OTHER; note = 2'-fluorocytidine-3'-phosphorothioate
  modified_base 2: mod_base = OTHER; note = 2'-O-methyluridine-3'-phosphorothioate
  modified_base 3: mod_base = OTHER; note = 2'-fluoroadenosine-3'-phosphate
  modified_base 4: mod_base = OTHER; note = 2'-O-methylguanosine-3'-phosphate
  modified_base 5: mod_base = OTHER; note = 2'-fluoroadenosine-3'-phosphate
  modified_base 6: mod_base = OTHER; note = 2'-O-methylcytidine-3'-phosphate
  modified_base 7: mod_base = OTHER; note = 2'-fluorocytidine-3'-phosphate
  modified_base 8: mod_base = OTHER; note = 2'-O-methyluridine-3'-phosphate
  modified_base 9: mod_base = OTHER; note = 2'-fluoroguanosine-3'-phosphate
  modified_base 10: mod_base = OTHER; note = 2'-fluorouridine-3'-phosphate
  modified_base 11: mod_base = OTHER; note = 2'-fluorouridine-3'-phosphate
  modified_base 12: mod_base = OTHER; note = 2'-O-methyluridine-3'-phosphate
  modified_base 13: mod_base = OTHER; note = 2'-fluorouridine-3'-phosphate
  modified_base 14: mod_base = OTHER; note = 2'-O-methylguanosine-3'-phosphate
  modified_base 15: mod_base = OTHER; note = 2'-fluorocytidine-3'-phosphate
  modified_base 16: mod_base = OTHER; note = 2'-O-methyluridine-3'-phosphate
  modified_base 17: mod_base = OTHER; note = 2'-fluorouridine-3'-phosphate
  modified_base 18: mod_base = OTHER; note = 2'-O-methyluridine-3'-phosphate
  modified_base 19: mod_base = OTHER; note = 2'-fluorouridine-3'-phosphate
  modified_base 20: mod_base = OTHER; note = 2'-O-methylguanosine-3'-phosphate
  modified_base 21: mod_base = OTHER; note = 2'-fluorouridine-3'-phosphate N-[tris(GalNAc-alkyl)-amidodecanoyl)]-4-hydroxyprolinol Hyp-(GalNAc-alkyl)3
ctagacctgttttgcttttgt

SEQ ID NO: 298 - RNA, 23 nt, synthetic construct
  source 1..23: mol_type = other RNA; note = Description of Artificial Sequence: Synthetic oligonucleotide
  modified_base 1: mod_base = OTHER; note = 2'-O-methyladenosine-3'-phosphorothioate
  modified_base 2: mod_base = OTHER; note = 2'-fluorocytidine-3'-phosphorothioate
  modified_base 3: mod_base = OTHER; note = 2'-O-methyladenosine-3'-phosphate
  modified_base 4: mod_base = OTHER; note = 2'-fluoroadenosine-3'-phosphate
  modified_base 5: mod_base = OTHER; note = 2'-O-methyladenosine-3'-phosphate
  modified_base 6: mod_base = OTHER; note = 2'-fluoroadenosine-3'-phosphorothioate
  modified_base 7: mod_base = OTHER; note = 2'-O-methylguanosine-3'-phosphate
  modified_base 8: mod_base = OTHER; note = 2'-fluorocytidine-3'-phosphate
  modified_base 9: mod_base = OTHER; note = 2'-O-methyladenosine-3'-phosphate
  modified_base 10: mod_base = OTHER; note = 2'-fluoroadenosine-3'-phosphate
  modified_base 11: mod_base = OTHER; note = 2'-O-methyladenosine-3'-phosphate
  modified_base 12: mod_base = OTHER; note = 2'-O-methyladenosine-3'-phosphate
  modified_base 13: mod_base = OTHER; note = 2'-O-methylcytidine-3'-phosphate
  modified_base 14: mod_base = OTHER; note = 2'-fluoroadenosine-3'-phosphate
  modified_base 15: mod_base = OTHER; note = 2'-O-methylguanosine-3'-phosphate
  modified_base 16: mod_base = OTHER; note = 2'-fluoroguanosine-3'-phosphate
  modified_base 17: mod_base = OTHER; note = 2'-O-methyluridine-3'-phosphate
  modified_base 18: mod_base = OTHER; note = 2'-fluorocytidine-3'-phosphorothioate
  modified_base 19: mod_base = OTHER; note = 2'-O-methyluridine-3'-phosphate
  modified_base 20: mod_base = OTHER; note = 2'-fluoroadenosine-3'-phosphate
  modified_base 21: mod_base = OTHER; note = 2'-O-methylguanosine-3'-phosphorothioate
  modified_base 22: mod_base = OTHER; note = 2'-O-methyladenosine-3'-phosphorothioate
  modified_base 23: mod_base = OTHER; note = 2'-O-methyladenosine-3'-phosphate
acaaaagcaaaacaggtctagaa

SEQ ID NO: 299 - RNA, 21 nt, synthetic construct
  source 1..21: mol_type = other RNA; note = Description of Artificial Sequence: Synthetic oligonucleotide
  modified_base 1: mod_base = OTHER; note = 2'-fluorocytidine-3'-phosphorothioate
  modified_base 2: mod_base = OTHER; note = 2'-O-methyluridine-3'-phosphorothioate
  modified_base 3: mod_base = OTHER; note = 2'-fluoroadenosine-3'-phosphate
  modified_base 4: mod_base = OTHER; note = 2'-O-methylguanosine-3'-phosphate
  modified_base 5: mod_base = OTHER; note = 2'-fluoroadenosine-3'-phosphate
  modified_base 6: mod_base = OTHER; note = 2'-O-methylcytidine-3'-phosphate
  modified_base 7: mod_base = OTHER; note = 2'-fluorocytidine-3'-phosphate
  modified_base 8: mod_base = OTHER; note = 2'-O-methyluridine-3'-phosphate
  modified_base 9: mod_base = OTHER; note = 2'-fluoroguanosine-3'-phosphate
  modified_base 10: mod_base = OTHER; note = 2'-fluorouridine-3'-phosphate
  modified_base 11: mod_base = OTHER; note = 2'-fluorouridine-3'-phosphate
  modified_base 12: mod_base = OTHER; note = 2'-O-methyluridine-3'-phosphate
  modified_base 13: mod_base = OTHER; note = 2'-fluorouridine-3'-phosphate
  modified_base 14: mod_base = OTHER; note = 2'-O-methylguanosine-3'-phosphate
  modified_base 15: mod_base = OTHER; note = 2'-fluorocytidine-3'-phosphate
  modified_base 16: mod_base = OTHER; note = 2'-O-methyluridine-3'-phosphate
  modified_base 17: mod_base = OTHER; note = 2'-fluorouridine-3'-phosphate
  modified_base 18: mod_base = OTHER; note = 2'-O-methyluridine-3'-phosphate
  modified_base 19: mod_base = OTHER; note = 2'-fluorouridine-3'-phosphate
  modified_base 20: mod_base = OTHER; note = 2'-O-methylguanosine-3'-phosphorothioate
  modified_base 21: mod_base = OTHER; note = 2'-fluorouridine-3'-phosphate N-[tris(GalNAc-alkyl)-amidodecanoyl)]-4-hydroxyprolinol Hyp-(GalNAc-alkyl)3
ctagacctgttttgcttttgt

SEQ ID NO: 300 - RNA, 23 nt, synthetic construct
  source 1..23: mol_type = other RNA; note = Description of Artificial Sequence: Synthetic oligonucleotide
  modified_base 1: mod_base = OTHER; note = 2'-O-methyladenosine-3'-phosphorothioate
  modified_base 2: mod_base = OTHER; note = 2'-fluorocytidine-3'-phosphorothioate
  modified_base 3: mod_base = OTHER; note = 2'-O-methyladenosine-3'-phosphate
  modified_base 4: mod_base = OTHER; note = 2'-fluoroadenosine-3'-phosphate
  modified_base 5: mod_base = OTHER; note = 2'-O-methyladenosine-3'-phosphate
  modified_base 6: mod_base = OTHER; note = 2'-fluoroadenosine-3'-phosphorothioate
  modified_base 7: mod_base = OTHER; note = 2'-O-methylguanosine-3'-phosphate
  modified_base 8: mod_base = OTHER; note = 2'-fluorocytidine-3'-phosphate
  modified_base 9: mod_base = OTHER; note = 2'-O-methyladenosine-3'-phosphate
  modified_base 10: mod_base = OTHER; note = 2'-fluoroadenosine-3'-phosphate
  modified_base 11: mod_base = OTHER; note = 2'-O-methyladenosine-3'-phosphate
  modified_base 12: mod_base = OTHER; note = 2'-O-methyladenosine-3'-phosphate
  modified_base 13: mod_base = OTHER; note = 2'-O-methylcytidine-3'-phosphate
  modified_base 14: mod_base = OTHER; note = 2'-fluoroadenosine-3'-phosphate
  modified_base 15: mod_base = OTHER; note = 2'-O-methylguanosine-3'-phosphate
  modified_base 16: mod_base = OTHER; note = 2'-fluoroguanosine-3'-phosphate
  modified_base 17: mod_base = OTHER; note = 2'-O-methyluridine-3'-phosphate
  modified_base 18: mod_base = OTHER; note = 2'-fluorocytidine-3'-phosphorothioate
  modified_base 19: mod_base = OTHER; note = 2'-O-methyluridine-3'-phosphate
  modified_base 20: mod_base = OTHER; note = 2'-fluoroadenosine-3'-phosphate
  modified_base 21: mod_base = OTHER; note = 2'-O-methylguanosine-3'-phosphorothioate
  modified_base 22: mod_base = OTHER; note = 2'-O-methyladenosine-3'-phosphorothioate
  modified_base 23: mod_base = OTHER; note = 2'-O-methyladenosine-3'-phosphate
acaaaagcaaaacaggtctagaa

SEQ ID NO: 301 - RNA, 21 nt, synthetic construct
  source 1..21: mol_type = other RNA; note = Description of Artificial Sequence: Synthetic oligonucleotide
  modified_base 1: mod_base = OTHER; note = 2'-fluorocytidine-3'-phosphorothioate
  modified_base 2: mod_base = OTHER; note = 2'-O-methyluridine-3'-phosphorothioate
  modified_base 3: mod_base = OTHER; note = 2'-fluoroadenosine-3'-phosphate
  modified_base 4: mod_base = OTHER; note = 2'-O-methylguanosine-3'-phosphate
  modified_base 5: mod_base = OTHER; note = 2'-fluoroadenosine-3'-phosphate
  modified_base 6: mod_base = OTHER; note = 2'-O-methylcytidine-3'-phosphate
  modified_base 7: mod_base = OTHER; note = 2'-fluorocytidine-3'-phosphate
  modified_base 8: mod_base = OTHER; note = 2'-O-methyluridine-3'-phosphate
  modified_base 9: mod_base = OTHER; note = 2'-fluoroguanosine-3'-phosphate
  modified_base 10: mod_base = OTHER; note = 2'-fluorouridine-3'-phosphate
  modified_base 11: mod_base = OTHER; note = 2'-fluorouridine-3'-phosphate
  modified_base 12: mod_base = OTHER; note = 2'-O-methyluridine-3'-phosphate
  modified_base 13: mod_base = OTHER; note = 2'-fluorouridine-3'-phosphate
  modified_base 14: mod_base = OTHER; note = 2'-O-methylguanosine-3'-phosphate
  modified_base 15: mod_base = OTHER; note = 2'-fluorocytidine-3'-phosphate
  modified_base 16: mod_base = OTHER; note = 2'-O-methyluridine-3'-phosphate
  modified_base 17: mod_base = OTHER; note = 2'-fluorouridine-3'-phosphate
  modified_base 18: mod_base = OTHER; note = 2'-O-methyluridine-3'-phosphate
  modified_base 19: mod_base = OTHER; note = 2'-fluorouridine-3'-phosphorothioate
  modified_base 20: mod_base = OTHER; note = 2'-O-methylguanosine-3'-phosphorothioate
  modified_base 21: mod_base = OTHER; note = 2'-fluorouridine-3'-phosphate N-[tris(GalNAc-alkyl)-amidodecanoyl)]-4-hydroxyprolinol Hyp-(GalNAc-alkyl)3
ctagacctgttttgcttttgt

SEQ ID NO: 302 - RNA, 23 nt, synthetic construct
  source 1..23: mol_type = other RNA; note = Description of Artificial Sequence: Synthetic oligonucleotide
  modified_base 1: mod_base = OTHER; note = 2'-O-methyladenosine-3'-phosphorothioate
  modified_base 2: mod_base = OTHER; note = 2'-fluorocytidine-3'-phosphorothioate
  modified_base 3: mod_base = OTHER; note = 2'-O-methyladenosine-3'-phosphate
  modified_base 4: mod_base = OTHER; note = 2'-fluoroadenosine-3'-phosphate
  modified_base 5: mod_base = OTHER; note = 2'-O-methyladenosine-3'-phosphate
  modified_base 6: mod_base = OTHER; note = 2'-fluoroadenosine-3'-phosphorothioate
  modified_base 7: mod_base = OTHER; note = 2'-O-methylguanosine-3'-phosphate
  modified_base 8: mod_base = OTHER; note = 2'-fluorocytidine-3'-phosphate
  modified_base 9: mod_base = OTHER; note = 2'-O-methyladenosine-3'-phosphate
  modified_base 10: mod_base = OTHER; note = 2'-fluoroadenosine-3'-phosphate
  modified_base 11: mod_base = OTHER; note = 2'-O-methyladenosine-3'-phosphate
  modified_base 12: mod_base = OTHER; note = 2'-O-methyladenosine-3'-phosphate
  modified_base 13: mod_base = OTHER; note = 2'-O-methylcytidine-3'-phosphate
  modified_base 14: mod_base = OTHER; note = 2'-fluoroadenosine-3'-phosphate
  modified_base 15: mod_base = OTHER; note = 2'-O-methylguanosine-3'-phosphate
  modified_base 16: mod_base = OTHER; note = 2'-fluoroguanosine-3'-phosphate
  modified_base 17: mod_base = OTHER; note = 2'-O-methyluridine-3'-phosphate
  modified_base 18: mod_base = OTHER; note = 2'-fluorocytidine-3'-phosphorothioate
  modified_base 19: mod_base = OTHER; note = 2'-O-methyluridine-3'-phosphate
  modified_base 20: mod_base = OTHER; note = 2'-fluoroadenosine-3'-phosphate
  modified_base 21: mod_base = OTHER; note = 2'-O-methylguanosine-3'-phosphorothioate
  modified_base 22: mod_base = OTHER; note = 2'-O-methyladenosine-3'-phosphorothioate
  modified_base 23: mod_base = OTHER; note = 2'-O-methyladenosine-3'-phosphate
acaaaagcaaaacaggtctagaa

SEQ ID NO: 303 - RNA, 21 nt, synthetic construct
  source 1..21: mol_type = other RNA; note = Description of Artificial Sequence: Synthetic oligonucleotide
  modified_base 1: mod_base = OTHER; note = 2'-fluorocytidine-3'-phosphorothioate
  modified_base 2: mod_base = OTHER; note = 2'-O-methyluridine-3'-phosphorothioate
  modified_base 3: mod_base = OTHER; note = 2'-fluoroadenosine-3'-phosphate
  modified_base 4: mod_base = OTHER; note = 2'-O-methylguanosine-3'-phosphate
  modified_base 5: mod_base = OTHER; note = 2'-fluoroadenosine-3'-phosphate
  modified_base 6: mod_base = OTHER; note = 2'-O-methylcytidine-3'-phosphate
  modified_base 7: mod_base = OTHER; note = 2'-fluorocytidine-3'-phosphate
  modified_base 8: mod_base = OTHER; note = 2'-O-methyluridine-3'-phosphate
  modified_base 9: mod_base = OTHER; note = 2'-fluoroguanosine-3'-phosphate
  modified_base 10: mod_base = OTHER; note = 2'-fluorouridine-3'-phosphate
  modified_base 11: mod_base = OTHER; note = 2'-fluorouridine-3'-phosphate
  modified_base 12: mod_base = OTHER; note = 2'-O-methyluridine-3'-phosphate
  modified_base 13: mod_base = OTHER; note = 2'-fluorouridine-3'-phosphate
  modified_base 14: mod_base = OTHER; note = 2'-O-methylguanosine-3'-phosphate
  modified_base 15: mod_base = OTHER; note = 2'-fluorocytidine-3'-phosphorothioate
  modified_base 16: mod_base = OTHER; note = 2'-O-methyluridine-3'-phosphate
  modified_base 17: mod_base = OTHER; note = 2'-fluorouridine-3'-phosphorothioate
  modified_base 18: mod_base = OTHER; note = 2'-O-methyluridine-3'-phosphate
  modified_base 19: mod_base = OTHER; note = 2'-fluorouridine-3'-phosphorothioate
  modified_base 20: mod_base = OTHER; note = 2'-O-methylguanosine-3'-phosphorothioate
  modified_base 21: mod_base = OTHER; note = 2'-fluorouridine-3'-phosphate N-[tris(GalNAc-alkyl)-amidodecanoyl)]-4-hydroxyprolinol Hyp-(GalNAc-alkyl)3
ctagacctgttttgcttttgt

SEQ ID NO: 304 - RNA, 23 nt, synthetic construct
  source 1..23: mol_type = other RNA; note = Description of Artificial Sequence: Synthetic oligonucleotide
  modified_base 1: mod_base = OTHER; note = 2'-O-methyladenosine-3'-phosphorothioate
  modified_base 2: mod_base = OTHER; note = 2'-fluorocytidine-3'-phosphorothioate
  modified_base 3: mod_base = OTHER; note = 2'-O-methyladenosine-3'-phosphate
  modified_base 4: mod_base = OTHER; note = 2'-fluoroadenosine-3'-phosphate
  modified_base 5: mod_base = OTHER; note = 2'-O-methyladenosine-3'-phosphate
  modified_base 6: mod_base = OTHER; note = 2'-fluoroadenosine-3'-phosphorothioate
  modified_base 7: mod_base = OTHER; note = 2'-O-methylguanosine-3'-phosphate
  modified_base 8: mod_base = OTHER; note = 2'-fluorocytidine-3'-phosphate
  modified_base 9: mod_base = OTHER; note = 2'-O-methyladenosine-3'-phosphate
  modified_base 10: mod_base = OTHER; note = 2'-fluoroadenosine-3'-phosphate
  modified_base 11: mod_base = OTHER; note = 2'-O-methyladenosine-3'-phosphate
  modified_base 12: mod_base = OTHER; note = 2'-O-methyladenosine-3'-phosphate
  modified_base 13: mod_base = OTHER; note = 2'-O-methylcytidine-3'-phosphate
  modified_base 14: mod_base = OTHER; note = 2'-fluoroadenosine-3'-phosphate
  modified_base 15: mod_base = OTHER; note = 2'-O-methylguanosine-3'-phosphate
  modified_base 16: mod_base = OTHER; note = 2'-fluoroguanosine-3'-phosphate
  modified_base 17: mod_base = OTHER; note = 2'-O-methyluridine-3'-phosphate
  modified_base 18: mod_base = OTHER; note = 2'-fluorocytidine-3'-phosphorothioate
  modified_base 19: mod_base = OTHER; note = 2'-O-methyluridine-3'-phosphate
  modified_base 20: mod_base = OTHER; note = 2'-fluoroadenosine-3'-phosphate
  modified_base 21: mod_base = OTHER; note = 2'-O-methylguanosine-3'-phosphorothioate
  modified_base 22: mod_base = OTHER; note = 2'-O-methyladenosine-3'-phosphorothioate
  modified_base 23: mod_base = OTHER; note = 2'-O-methyladenosine-3'-phosphate
acaaaagcaaaacaggtctagaa

SEQ ID NO: 305 - RNA, 21 nt, synthetic construct
  source 1..21: mol_type = other RNA; note = Description of Artificial Sequence: Synthetic oligonucleotide
  modified_base 1: mod_base = OTHER; note = 2'-fluorocytidine-3'-phosphorothioate
  modified_base 2: mod_base = OTHER; note = 2'-O-methyluridine-3'-phosphorothioate
  modified_base 3: mod_base = OTHER; note = 2'-fluoroadenosine-3'-phosphate
  modified_base 4: mod_base = OTHER; note = 2'-O-methylguanosine-3'-phosphate
  modified_base 5: mod_base = OTHER; note = 2'-fluoroadenosine-3'-phosphate
  modified_base 6: mod_base = OTHER; note = 2'-O-methylcytidine-3'-phosphate
  modified_base 7: mod_base = OTHER; note = 2'-fluorocytidine-3'-phosphate
  modified_base 8: mod_base = OTHER; note = 2'-O-methyluridine-3'-phosphate
  modified_base 9: mod_base = OTHER; note = 2'-fluoroguanosine-3'-phosphate
  modified_base 10: mod_base = OTHER; note = 2'-fluorouridine-3'-phosphate
  modified_base 11: mod_base = OTHER; note = 2'-fluorouridine-3'-phosphate
  modified_base 12: mod_base = OTHER; note = 2'-O-methyluridine-3'-phosphate
  modified_base 13: mod_base = OTHER; note = 2'-fluorouridine-3'-phosphate
  modified_base 14: mod_base = OTHER; note = 2'-O-methylguanosine-3'-phosphate
  modified_base 15: mod_base = OTHER; note = 2'-fluorocytidine-3'-phosphorothioate
  modified_base 16: mod_base = OTHER; note = 2'-O-methyluridine-3'-phosphate
  modified_base 17: mod_base = OTHER; note = 2'-fluorouridine-3'-phosphorothioate
  modified_base 18: mod_base = OTHER; note = 2'-O-methyluridine-3'-phosphate
  modified_base 19: mod_base = OTHER; note = 2'-fluorouridine-3'-phosphorothioate
  modified_base 20: mod_base = OTHER; note = 2'-O-methylguanosine-3'-phosphorothioate
  modified_base 21: mod_base = OTHER; note = 2'-fluorouridine-3'-phosphorothioate N-[tris(GalNAc-alkyl)-amidodecanoyl)]-4-hydroxyprolinol Hyp-(GalNAc-alkyl)3
ctagacctgttttgcttttgt

SEQ ID NO: 306 - RNA, 23 nt, synthetic construct
  source 1..23: mol_type = other RNA; note = Description of Artificial Sequence: Synthetic oligonucleotide
  modified_base 1: mod_base = OTHER; note = 2'-O-methyladenosine-3'-phosphorothioate
  modified_base 2: mod_base = OTHER; note = 2'-fluorocytidine-3'-phosphorothioate
  modified_base 3: mod_base = OTHER; note = 2'-O-methyladenosine-3'-phosphate
  modified_base 4: mod_base = OTHER; note = 2'-fluoroadenosine-3'-phosphate
  modified_base 5: mod_base = OTHER; note = 2'-O-methyladenosine-3'-phosphate
  modified_base 6: mod_base = OTHER; note = 2'-fluoroadenosine-3'-phosphorothioate
  modified_base 7: mod_base = OTHER; note = 2'-O-methylguanosine-3'-phosphate
  modified_base 8: mod_base = OTHER; note = 2'-fluorocytidine-3'-phosphate
  modified_base 9: mod_base = OTHER; note = 2'-O-methyladenosine-3'-phosphate
  modified_base 10: mod_base = OTHER; note = 2'-fluoroadenosine-3'-phosphate
  modified_base 11: mod_base = OTHER; note = 2'-O-methyladenosine-3'-phosphate
  modified_base 12: mod_base = OTHER; note = 2'-O-methyladenosine-3'-phosphate
  modified_base 13: mod_base = OTHER; note = 2'-O-methylcytidine-3'-phosphate
  modified_base 14: mod_base = OTHER; note = 2'-fluoroadenosine-3'-phosphate
  modified_base 15: mod_base = OTHER; note = 2'-O-methylguanosine-3'-phosphate
  modified_base 16: mod_base = OTHER; note = 2'-fluoroguanosine-3'-phosphate
  modified_base 17: mod_base = OTHER; note = 2'-O-methyluridine-3'-phosphate
  modified_base 18: mod_base = OTHER; note = 2'-fluorocytidine-3'-phosphorothioate
  modified_base 19: mod_base = OTHER; note = 2'-O-methyluridine-3'-phosphate
  modified_base 20: mod_base = OTHER; note = 2'-fluoroadenosine-3'-phosphate
  modified_base 21: mod_base = OTHER; note = 2'-O-methylguanosine-3'-phosphorothioate
  modified_base 22: mod_base = OTHER; note = 2'-O-methyladenosine-3'-phosphorothioate
  modified_base 23: mod_base = OTHER; note = 2'-O-methyladenosine-3'-phosphate
acaaaagcaaaacaggtctagaa

SEQ ID NO: 307 - RNA, 21 nt, synthetic construct
  source 1..21: mol_type = other RNA; note = Description of Artificial Sequence: Synthetic oligonucleotide
  modified_base 1: mod_base = OTHER; note = 2'-fluorocytidine-3'-phosphorothioate
  modified_base 2: mod_base = OTHER; note = 2'-O-methyluridine-3'-phosphorothioate
  modified_base 3: mod_base = OTHER; note = 2'-fluoroadenosine-3'-phosphate
  modified_base 4: mod_base = OTHER; note = 2'-O-methylguanosine-3'-phosphate
  modified_base 5: mod_base = OTHER; note = 2'-fluoroadenosine-3'-phosphate
  modified_base 6: mod_base = OTHER; note = 2'-O-methylcytidine-3'-phosphate
  modified_base 7: mod_base = OTHER; note = 2'-fluorocytidine-3'-phosphate
  modified_base 8: mod_base = OTHER; note = 2'-O-methyluridine-3'-phosphate
  modified_base 9: mod_base = OTHER; note = 2'-fluoroguanosine-3'-phosphate
  modified_base 10: mod_base = OTHER; note = 2'-fluorouridine-3'-phosphate
  modified_base 11: mod_base = OTHER; note = 2'-fluorouridine-3'-phosphate
  modified_base 12: mod_base = OTHER; note = 2'-O-methyluridine-3'-phosphate
  modified_base 13: mod_base = OTHER; note = 2'-fluorouridine-3'-phosphate
  modified_base 14: mod_base = OTHER; note = 2'-O-methylguanosine-3'-phosphate
  modified_base 15: mod_base = OTHER; note = 2'-fluorocytidine-3'-phosphate
  modified_base 16: mod_base = OTHER; note = 2'-O-methyluridine-3'-phosphate
  modified_base 17: mod_base = OTHER; note = 2'-fluorouridine-3'-phosphate
  modified_base 18: mod_base = OTHER; note = 2'-O-methyluridine-3'-phosphate
  modified_base 19: mod_base = OTHER; note = 2'-fluorouridine-3'-phosphorothioate
  modified_base 20: mod_base = OTHER; note = 2'-O-methylguanosine-3'-phosphorothioate
  modified_base 21: mod_base = OTHER; note = 2'-fluorouridine-3'-phosphorothioate N-[tris(GalNAc-alkyl)-amidodecanoyl)]-4-hydroxyprolinol Hyp-(GalNAc-alkyl)3
ctagacctgttttgcttttgt

SEQ ID NO: 308 - RNA, 23 nt, synthetic construct
  source 1..23: mol_type = other RNA; note = Description of Artificial Sequence: Synthetic oligonucleotide
  modified_base 1: mod_base = OTHER; note = 2'-O-methyladenosine-3'-phosphorothioate
  modified_base 2: mod_base = OTHER; note = 2'-fluorocytidine-3'-phosphorothioate
  modified_base 3: mod_base = OTHER; note = 2'-O-methyladenosine-3'-phosphate
  modified_base 4: mod_base = OTHER; note = 2'-fluoroadenosine-3'-phosphate
  modified_base 5: mod_base = OTHER; note = 2'-O-methyladenosine-3'-phosphate
  modified_base 6: mod_base = OTHER; note = 2'-fluoroadenosine-3'-phosphorothioate
  modified_base 7: mod_base = OTHER; note = 2'-O-methylguanosine-3'-phosphate
  modified_base 8: mod_base = OTHER; note = 2'-fluorocytidine-3'-phosphate
  modified_base 9: mod_base = OTHER; note = 2'-O-methyladenosine-3'-phosphate
  modified_base 10: mod_base = OTHER; note = 2'-fluoroadenosine-3'-phosphate
  modified_base 11: mod_base = OTHER; note = 2'-O-methyladenosine-3'-phosphate
  modified_base 12: mod_base = OTHER; note = 2'-O-methyladenosine-3'-phosphate
  modified_base 13: mod_base = OTHER; note = 2'-O-methylcytidine-3'-phosphate
  modified_base 14: mod_base = OTHER; note = 2'-fluoroadenosine-3'-phosphate
  modified_base 15: mod_base = OTHER; note = 2'-O-methylguanosine-3'-phosphate
  modified_base 16: mod_base = OTHER; note = 2'-fluoroguanosine-3'-phosphate
  modified_base 17: mod_base = OTHER; note = 2'-O-methyluridine-3'-phosphate
  modified_base 18: mod_base = OTHER; note = 2'-fluorocytidine-3'-phosphorothioate
  modified_base 19: mod_base = OTHER; note = 2'-O-methyluridine-3'-phosphate
  modified_base 20: mod_base = OTHER; note = 2'-fluoroadenosine-3'-phosphate
  modified_base 21: mod_base = OTHER; note = 2'-O-methylguanosine-3'-phosphorothioate
  modified_base 22: mod_base = OTHER; note = 2'-O-methyladenosine-3'-phosphorothioate
  modified_base 23: mod_base = OTHER; note = 2'-O-methyladenosine-3'-phosphate
acaaaagcaaaacaggtctagaa

SEQ ID NO: 309 - RNA, 21 nt, synthetic construct
  source 1..21: mol_type = other RNA; note = Description of Artificial Sequence: Synthetic oligonucleotide
  modified_base 1: mod_base = OTHER; note = 2'-fluorocytidine-3'-phosphorothioate
  modified_base 2: mod_base = OTHER; note = 2'-O-methyluridine-3'-phosphorothioate
  modified_base 3: mod_base = OTHER; note = 2'-fluoroadenosine-3'-phosphate
  modified_base 4: mod_base = OTHER; note = 2'-O-methylguanosine-3'-phosphate
  modified_base 5: mod_base = OTHER; note = 2'-fluoroadenosine-3'-phosphate
  modified_base 6: mod_base = OTHER; note = 2'-O-methylcytidine-3'-phosphate
  modified_base 7: mod_base = OTHER; note = 2'-fluorocytidine-3'-phosphate
  modified_base 8: mod_base = OTHER; note = 2'-O-methyluridine-3'-phosphate
  modified_base 9: mod_base = OTHER; note = 2'-fluoroguanosine-3'-phosphate
  modified_base 10: mod_base = OTHER; note = 2'-fluorouridine-3'-phosphate
  modified_base 11: mod_base = OTHER; note = 2'-fluorouridine-3'-phosphate
  modified_base 12: mod_base = OTHER; note = 2'-O-methyluridine-3'-phosphate
  modified_base 13: mod_base = OTHER; note = 2'-fluorouridine-3'-phosphate
  modified_base 14: mod_base = OTHER; note = 2'-O-methylguanosine-3'-phosphate
  modified_base 15: mod_base = OTHER; note = 2'-fluorocytidine-3'-phosphate
  modified_base 16: mod_base = OTHER; note = 2'-O-methyluridine-3'-phosphate
  modified_base 17: mod_base = OTHER; note = 2'-fluorouridine-3'-phosphate
  modified_base 18: mod_base = OTHER; note = 2'-O-methyluridine-3'-phosphate
  modified_base 19: mod_base = OTHER; note = 2'-fluorouridine-3'-phosphate
  modified_base 20: mod_base = OTHER; note = 2'-O-methylguanosine-3'-phosphate
  modified_base 21: mod_base = OTHER; note = 2'-fluorouridine-3'-phosphorothioate N-[tris(GalNAc-alkyl)-amidodecanoyl)]-4-hydroxyprolinol Hyp-(GalNAc-alkyl)3
ctagacctgttttgcttttgt

SEQ ID NO: 310 - RNA, 23 nt, synthetic construct
  source 1..23: mol_type = other RNA; note = Description of Artificial Sequence: Synthetic oligonucleotide
  modified_base 1: mod_base = OTHER; note = 2'-O-methyladenosine-3'-phosphorothioate
  modified_base 2: mod_base = OTHER; note = 2'-fluorocytidine-3'-phosphorothioate
  modified_base 3: mod_base = OTHER; note = 2'-O-methyladenosine-3'-phosphate
  modified_base 4: mod_base = OTHER; note = 2'-fluoroadenosine-3'-phosphate
  modified_base 5: mod_base = OTHER; note = 2'-O-methyladenosine-3'-phosphate
  modified_base 6: mod_base = OTHER; note = 2'-fluoroadenosine-3'-phosphorothioate
  modified_base 7: mod_base = OTHER; note = 2'-O-methylguanosine-3'-phosphate
  modified_base 8: mod_base = OTHER; note = 2'-fluorocytidine-3'-phosphate
  modified_base 9: mod_base = OTHER; note = 2'-O-methyladenosine-3'-phosphate
  modified_base 10: mod_base = OTHER; note = 2'-fluoroadenosine-3'-phosphate
  modified_base 11: mod_base = OTHER; note = 2'-O-methyladenosine-3'-phosphate
  modified_base 12: mod_base = OTHER; note = 2'-O-methyladenosine-3'-phosphate
  modified_base 13: mod_base = OTHER; note = 2'-O-methylcytidine-3'-phosphate
  modified_base 14: mod_base = OTHER; note = 2'-fluoroadenosine-3'-phosphate
  modified_base 15: mod_base = OTHER; note = 2'-O-methylguanosine-3'-phosphate
  modified_base 16: mod_base = OTHER; note = 2'-fluoroguanosine-3'-phosphate
  modified_base 17: mod_base = OTHER; note = 2'-O-methyluridine-3'-phosphate
  modified_base 18: mod_base = OTHER; note = 2'-fluorocytidine-3'-phosphorothioate
  modified_base 19: mod_base = OTHER; note = 2'-O-methyluridine-3'-phosphate
  modified_base 20: mod_base = OTHER; note = 2'-fluoroadenosine-3'-phosphate
  modified_base 21: mod_base = OTHER; note = 2'-O-methylguanosine-3'-phosphorothioate
  modified_base 22: mod_base = OTHER; note = 2'-O-methyladenosine-3'-phosphorothioate
  modified_base 23: mod_base = OTHER; note = 2'-O-methyladenosine-3'-phosphate
acaaaagcaaaacaggtctagaa

SEQ ID NO: 311 - RNA, 21 nt, synthetic construct
  source 1..21: mol_type = other RNA; note = Description of Artificial Sequence: Synthetic oligonucleotide
  modified_base 1: mod_base = OTHER; note = 2'-fluorocytidine-3'-phosphorothioate
  modified_base 2: mod_base = OTHER; note = 2'-O-methyluridine-3'-phosphorothioate
  modified_base 3: mod_base = OTHER; note = 2'-fluoroadenosine-3'-phosphate
  modified_base 4: mod_base = OTHER; note = 2'-O-methylguanosine-3'-phosphate
  modified_base 5: mod_base = OTHER; note = 2'-fluoroadenosine-3'-phosphate
  modified_base 6: mod_base = OTHER; note = 2'-O-methylcytidine-3'-phosphate
  modified_base 7: mod_base = OTHER; note = 2'-fluorocytidine-3'-phosphate
  modified_base 8: mod_base = OTHER; note = 2'-O-methyluridine-3'-phosphate
  modified_base 9: mod_base = OTHER; note = 2'-fluoroguanosine-3'-phosphate
  modified_base 10: mod_base = OTHER; note = 2'-fluorouridine-3'-phosphate
  modified_base 11: mod_base = OTHER; note = 2'-fluorouridine-3'-phosphate
  modified_base 12: mod_base = OTHER; note = 2'-O-methyluridine-3'-phosphate
  modified_base 13: mod_base = OTHER; note = 2'-O-methyluridine-3'-phosphate
  modified_base 14: mod_base = OTHER; note = 2'-O-methylguanosine-3'-phosphate
  modified_base 15: mod_base = OTHER; note = 2'-fluorocytidine-3'-phosphate
  modified_base 16: mod_base = OTHER; note = 2'-O-methyluridine-3'-phosphate
  modified_base 17: mod_base = OTHER; note = 2'-O-methyluridine-3'-phosphate
  modified_base 18: mod_base = OTHER; note = 2'-O-methyluridine-3'-phosphate
  modified_base 19: mod_base = OTHER; note = 2'-O-methyluridine-3'-phosphate
  modified_base 20: mod_base = OTHER; note = 2'-O-methylguanosine-3'-phosphorothioate
  modified_base 21: mod_base = OTHER; note = 2'-O-methyluridine-3'-phosphate N-[tris(GalNAc-alkyl)-amidodecanoyl)]-4-hydroxyprolinol Hyp-(GalNAc-alkyl)3
ctagacctgttttgcttttgt

SEQ ID NO: 312 - RNA, 23 nt, synthetic construct
  source 1..23: mol_type = other RNA; note = Description of Artificial Sequence: Synthetic oligonucleotide
  modified_base 1: mod_base = OTHER; note = 2'-O-methyladenosine-3'-phosphorothioate
  modified_base 2: mod_base = OTHER; note = 2'-fluorocytidine-3'-phosphorothioate
  modified_base 3: mod_base = OTHER; note = 2'-O-methyladenosine-3'-phosphate
  modified_base 4: mod_base = OTHER; note = 2'-fluoroadenosine-3'-phosphate
  modified_base 5: mod_base = OTHER; note = 2'-O-methyladenosine-3'-phosphate
  modified_base 6: mod_base = OTHER; note = 2'-fluoroadenosine-3'-phosphorothioate
  modified_base 7: mod_base = OTHER; note = 2'-O-methylguanosine-3'-phosphate
  modified_base 8: mod_base = OTHER; note = 2'-fluorocytidine-3'-phosphate
  modified_base 9: mod_base = OTHER; note = 2'-O-methyladenosine-3'-phosphate
  modified_base 10: mod_base = OTHER; note = 2'-fluoroadenosine-3'-phosphate
  modified_base 11: mod_base = OTHER; note = 2'-O-methyladenosine-3'-phosphate
  modified_base 12: mod_base = OTHER; note = 2'-O-methyladenosine-3'-phosphate
  modified_base 13: mod_base = OTHER; note = 2'-O-methylcytidine-3'-phosphate
  modified_base 14: mod_base = OTHER; note = 2'-fluoroadenosine-3'-phosphate
  modified_base 15: mod_base = OTHER; note = 2'-O-methylguanosine-3'-phosphate
  modified_base 16: mod_base = OTHER; note = 2'-fluoroguanosine-3'-phosphate
  modified_base 17: mod_base = OTHER; note = 2'-O-methyluridine-3'-phosphate
  modified_base 18: mod_base = OTHER; note = 2'-fluorocytidine-3'-phosphorothioate
  modified_base 19: mod_base = OTHER; note = 2'-O-methyluridine-3'-phosphate
  modified_base 20: mod_base = OTHER; note = 2'-fluoroadenosine-3'-phosphate
  modified_base 21: mod_base = OTHER; note = 2'-O-methylguanosine-3'-phosphorothioate
  modified_base 22: mod_base = OTHER; note = 2'-O-methyladenosine-3'-phosphorothioate
  modified_base 23: mod_base = OTHER; note = 2'-O-methyladenosine-3'-phosphate
acaaaagcaaaacaggtctagaa

SEQ ID NO: 313 - RNA, 21 nt, synthetic construct
  source 1..21: mol_type = other RNA; note = Description of Artificial Sequence: Synthetic oligonucleotide
  modified_base 1: mod_base = OTHER; note = 2'-fluorocytidine-3'-phosphorothioate
  modified_base 2: mod_base = OTHER; note = 2'-O-methyluridine-3'-phosphorothioate
  modified_base 3: mod_base = OTHER; note = 2'-fluoroadenosine-3'-phosphate
  modified_base 4: mod_base = OTHER; note = 2'-O-methylguanosine-3'-phosphate
  modified_base 5: mod_base = OTHER; note = 2'-fluoroadenosine-3'-phosphate
  modified_base 6: mod_base = OTHER; note = 2'-O-methylcytidine-3'-phosphate
  modified_base 7: mod_base = OTHER; note = 2'-fluorocytidine-3'-phosphate
  modified_base 8: mod_base = OTHER; note = 2'-O-methyluridine-3'-phosphate
  modified_base 9: mod_base = OTHER; note = 2'-fluoroguanosine-3'-phosphate
  modified_base 10: mod_base = OTHER; note = 2'-fluorouridine-3'-phosphate
  modified_base 11: mod_base = OTHER; note = 2'-fluorouridine-3'-phosphate
  modified_base 12: mod_base = OTHER; note = 2'-O-methyluridine-3'-phosphate
  modified_base 13: mod_base = OTHER; note = 2'-fluorouridine-3'-phosphate
  modified_base 14: mod_base = OTHER; note = 2'-O-methylguanosine-3'-phosphate
  modified_base 15: mod_base = OTHER; note = 2'-fluorocytidine-3'-phosphate
  modified_base 16: mod_base = OTHER; note = 2'-O-methyluridine-3'-phosphate
  modified_base 17: mod_base = OTHER; note = 2'-fluorouridine-3'-phosphate
  modified_base 18: mod_base = OTHER; note = 2'-O-methyluridine-3'-phosphate
  modified_base 19: mod_base = OTHER; note = 2'-fluorouridine-3'-phosphate
  modified_base 20: mod_base = OTHER; note = 2'-O-methylguanosine-3'-phosphate
  modified_base 21: mod_base = OTHER; note = 2'-fluorouridine-3'-phosphate N-[tris(GalNAc-alkyl)-amidodecanoyl)]-4-hydroxyprolinol Hyp-(GalNAc-alkyl)3
ctagacctgttttgcttttgt

SEQ ID NO: 314 - RNA, 23 nt, synthetic construct
  source 1..23: mol_type = other RNA; note = Description of Artificial Sequence: Synthetic oligonucleotide
  modified_base 1: mod_base = OTHER; note = 2'-O-methyladenosine-3'-phosphorothioate
  modified_base 2: mod_base = OTHER; note = 2'-fluorocytidine-3'-phosphorothioate
  modified_base 3: mod_base = OTHER; note = 2'-O-methyladenosine-3'-phosphate
  modified_base 4: mod_base = OTHER; note = 2'-fluoroadenosine-3'-phosphate
  modified_base 5: mod_base = OTHER; note = 2'-O-methyladenosine-3'-phosphate
  modified_base 6: mod_base = OTHER; note = 2'-fluoroadenosine-3'-phosphorothioate
  modified_base 7: mod_base = OTHER; note = 2'-O-methylguanosine-3'-phosphate
  modified_base 8: mod_base = OTHER; note = 2'-fluorocytidine-3'-phosphate
  modified_base 9: mod_base = OTHER; note = 2'-O-methyladenosine-3'-phosphate
  modified_base 10: mod_base = OTHER; note = 2'-fluoroadenosine-3'-phosphate
  modified_base 11: mod_base = OTHER; note = 2'-O-methyladenosine-3'-phosphate
  modified_base 12: mod_base = OTHER; note = 2'-O-methyladenosine-3'-phosphate
  modified_base 13: mod_base = OTHER; note = 2'-O-methylcytidine-3'-phosphate
  modified_base 14: mod_base = OTHER; note = 2'-fluoroadenosine-3'-phosphate
  modified_base 15: mod_base = OTHER; note = 2'-O-methylguanosine-3'-phosphate
  modified_base 16: mod_base = OTHER; note = 2'-fluoroguanosine-3'-phosphate
  modified_base 17: mod_base = OTHER; note = 2'-O-methyluridine-3'-phosphate
  modified_base 18: mod_base = OTHER; note = 2'-fluorocytidine-3'-phosphorothioate
  modified_base 19: mod_base = OTHER; note = 2'-O-methyluridine-3'-phosphorothioate
  modified_base 20: mod_base = OTHER; note = 2'-fluoroadenosine-3'-phosphate
  modified_base 21: mod_base = OTHER; note = 2'-O-methylguanosine-3'-phosphorothioate
  modified_base 22: mod_base = OTHER; note = 2'-O-methyladenosine-3'-phosphorothioate
  modified_base 23: mod_base = OTHER; note = 2'-O-methyladenosine-3'-phosphate
acaaaagcaaaacaggtctagaa

SEQ ID NO: 315 - RNA, 21 nt, synthetic construct
  source 1..21: mol_type = other RNA; note = Description of Artificial Sequence: Synthetic oligonucleotide
  modified_base 1: mod_base = OTHER; note = 2'-O-methylcytidine-3'-phosphorothioate
  modified_base 2: mod_base = OTHER; note = 2'-O-methyluridine-3'-phosphorothioate
  modified_base 6: mod_base = OTHER; note = 2'-O-methylcytidine-3'-phosphate
  modified_base 7: mod_base = OTHER; note = 2'-O-methylcytidine-3'-phosphate
  modified_base 8: mod_base = OTHER; note = 2'-O-methyluridine-3'-phosphate
  modified_base 10: mod_base = OTHER; note = 2'-O-methyluridine-3'-phosphate
  modified_base 11: mod_base = OTHER; note = 2'-O-methyluridine-3'-phosphate
  modified_base 12: mod_base = OTHER; note = 2'-O-methyluridine-3'-phosphate
  modified_base 13: mod_base = OTHER; note = 2'-O-methyluridine-3'-phosphate
  modified_base 15: mod_base = OTHER; note = 2'-O-methylcytidine-3'-phosphate
  modified_base 16: mod_base = OTHER; note = 2'-O-methyluridine-3'-phosphate
  modified_base 17: mod_base = OTHER; note = 2'-O-methyluridine-3'-phosphate
  modified_base 18: mod_base = OTHER; note = 2'-O-methyluridine-3'-phosphate
  modified_base 19: mod_base = OTHER; note = 2'-O-methyluridine-3'-phosphate
  modified_base 21: mod_base = OTHER; note = 2'-O-methyluridine-3'-phosphate N-[tris(GalNAc-alkyl)-amidodecanoyl)]-4-hydroxyprolinol Hyp-(GalNAc-alkyl)3
ctagacctgttttgcttttgt

SEQ ID NO: 316 - RNA, 23 nt, synthetic construct
  source 1..23: mol_type = other RNA; note = Description of Artificial Sequence: Synthetic oligonucleotide
  modified_base 1: mod_base = OTHER; note = adenosine-3'-phosphorothioate
  modified_base 2: mod_base = OTHER; note = 2'-O-methylcytidine-3'-phosphorothioate
  modified_base 8: mod_base = OTHER; note = 2'-O-methylcytidine-3'-phosphate
  modified_base 13: mod_base = OTHER; note = 2'-O-methylcytidine-3'-phosphate
  modified_base 17: mod_base = OTHER; note = 2'-O-methyluridine-3'-phosphate
  modified_base 18: mod_base = OTHER; note = 2'-O-methylcytidine-3'-phosphate
  modified_base 19: mod_base = OTHER; note = 2'-O-methyluridine-3'-phosphate
  modified_base 21: mod_base = OTHER; note = guanosine-3'-phosphorothioate
  modified_base 22: mod_base = OTHER; note = 2'-O-methyladenosine-3'-phosphorothioate
  modified_base 23: mod_base = OTHER; note = 2'-O-methyladenosine-3'-phosphate
acaaaagcaaaacaggtctagaa

SEQ ID NO: 317 - RNA, 21 nt, synthetic construct
  source 1..21: mol_type = other RNA; note = Description of Artificial Sequence: Synthetic oligonucleotide
  modified_base 1: mod_base = OTHER; note = 2'-fluorocytidine-3'-phosphorothioate
  modified_base 2: mod_base = OTHER; note = 2'-O-methyluridine-3'-phosphorothioate
  modified_base 3: mod_base = OTHER; note = 2'-fluoroadenosine-3'-phosphate
  modified_base 4: mod_base = OTHER; note = 2'-fluoroguanosine-3'-phosphate
  modified_base 5: mod_base = OTHER; note = 2'-fluoroadenosine-3'-phosphate
  modified_base 6: mod_base = OTHER; note = 2'-O-methylcytidine-3'-phosphate
  modified_base 7: mod_base = OTHER; note = 2'-O-methylcytidine-3'-phosphate
  modified_base 8: mod_base = OTHER; note = 2'-O-methyluridine-3'-phosphate
  modified_base 9: mod_base = OTHER; note = 2'-fluoroguanosine-3'-phosphate
  modified_base 10: mod_base = OTHER; note = 2'-O-methyluridine-3'-phosphate
  modified_base 11: mod_base = OTHER; note = 2'-O-methyluridine-3'-phosphate
  modified_base 12: mod_base = OTHER; note = 2'-O-methyluridine-3'-phosphate
  modified_base 13: mod_base = OTHER; note = 2'-O-methyluridine-3'-phosphate
  modified_base 14: mod_base = OTHER; note = 2'-fluoroguanosine-3'-phosphate
  modified_base 15: mod_base = OTHER; note = 2'-O-methylcytidine-3'-phosphate
  modified_base 16: mod_base = OTHER; note = 2'-O-methyluridine-3'-phosphate
  modified_base 17: mod_base = OTHER; note = 2'-O-methyluridine-3'-phosphate
  modified_base 18: mod_base = OTHER; note = 2'-O-methyluridine-3'-phosphate
  modified_base 19: mod_base = OTHER; note = 2'-O-methyluridine-3'-phosphate
  modified_base 20: mod_base = OTHER; note = 2'-fluoroguanosine-3'-phosphate
  modified_base 21: mod_base = OTHER; note = 2'-O-methyluridine-3'-phosphate N-[tris(GalNAc-alkyl)-amidodecanoyl)]-4-hydroxyprolinol Hyp-(GalNAc-alkyl)3
ctagacctgttttgcttttgt

SEQ ID NO: 318 - RNA, 23 nt, synthetic construct
  source 1..23: mol_type = other RNA; note = Description of Artificial Sequence: Synthetic oligonucleotide
  modified_base 1: mod_base = OTHER; note = 2'-O-methyladenosine-3'-phosphorothioate
  modified_base 2: mod_base = OTHER; note = 2'-fluorocytidine-3'-phosphorothioate
  modified_base 3: mod_base = OTHER; note = 2'-fluoroadenosine-3'-phosphate
  modified_base 4: mod_base = OTHER; note = 2'-fluoroadenosine-3'-phosphate
  modified_base 5: mod_base = OTHER; note = 2'-fluoroadenosine-3'-phosphate
  modified_base 6: mod_base = OTHER; note = 2'-fluoroadenosine-3'-phosphate
  modified_base 7: mod_base = OTHER; note = 2'-fluoroguanosine-3'-phosphate
  modified_base 8: mod_base = OTHER; note = 2'-O-methylcytidine-3'-phosphate
  modified_base 9: mod_base = OTHER; note = 2'-fluoroadenosine-3'-phosphate
  modified_base 10: mod_base = OTHER; note = 2'-fluoroadenosine-3'-phosphate
  modified_base 11: mod_base = OTHER; note = 2'-fluoroadenosine-3'-phosphate
  modified_base 12: mod_base = OTHER; note = 2'-fluoroadenosine-3'-phosphate
  modified_base 13: mod_base = OTHER; note = 2'-O-methylcytidine-3'-phosphate
  modified_base 14: mod_base = OTHER; note = 2'-fluoroadenosine-3'-phosphate
  modified_base 15: mod_base = OTHER; note = 2'-fluoroguanosine-3'-phosphate
  modified_base 16: mod_base = OTHER; note = 2'-fluoroguanosine-3'-phosphate
  modified_base 17: mod_base = OTHER; note = 2'-O-methyluridine-3'-phosphate
  modified_base 18: mod_base = OTHER; note = 2'-O-methylcytidine-3'-phosphate
  modified_base 19: mod_base = OTHER; note = 2'-O-methyluridine-3'-phosphate
  modified_base 20: mod_base = OTHER; note = 2'-fluoroadenosine-3'-phosphate
  modified_base 21: mod_base = OTHER; note = 2'-fluoroguanosine-3'-phosphorothioate
  modified_base 22: mod_base = OTHER; note = 2'-O-methyladenosine-3'-phosphorothioate
  modified_base 23: mod_base = OTHER; note = 2'-O-methyladenosine-3'-phosphate
acaaaagcaaaacaggtctagaa

SEQ ID NO: 319 - RNA, 21 nt, synthetic construct
  source 1..21: mol_type = other RNA; note = Description of Artificial Sequence: Synthetic oligonucleotide
  modified_base 1: mod_base = OTHER; note = 2'-fluorocytidine-3'-phosphorothioate
  modified_base 2: mod_base = OTHER; note = 2'-O-methyluridine-3'-phosphorothioate
  modified_base 3: mod_base = OTHER; note = 2'-fluoroadenosine-3'-phosphate
  modified_base 4: mod_base = OTHER; note = 2'-fluoroguanosine-3'-phosphate
  modified_base 5: mod_base = OTHER; note = 2'-fluoroadenosine-3'-phosphate
  modified_base 6: mod_base = OTHER; note = 2'-O-methylcytidine-3'-phosphate
  modified_base 7: mod_base = OTHER; note = 2'-O-methylcytidine-3'-phosphate
  modified_base 8: mod_base = OTHER; note = 2'-O-methyluridine-3'-phosphate
  modified_base 9: mod_base = OTHER; note = 2'-fluoroguanosine-3'-phosphate
  modified_base 10: mod_base = OTHER; note = 2'-O-methyluridine-3'-phosphate
  modified_base 11: mod_base = OTHER; note = 2'-O-methyluridine-3'-phosphate
  modified_base 12: mod_base = OTHER; note = 2'-O-methyluridine-3'-phosphate
  modified_base 13: mod_base = OTHER; note = 2'-O-methyluridine-3'-phosphate
  modified_base 14: mod_base = OTHER; note = 2'-fluoroguanosine-3'-phosphate
  modified_base 15: mod_base = OTHER; note = 2'-O-methylcytidine-3'-phosphate
  modified_base 16: mod_base = OTHER; note = 2'-O-methyluridine-3'-phosphate
  modified_base 17: mod_base = OTHER; note = 2'-O-methyluridine-3'-phosphate
  modified_base 18: mod_base = OTHER; note = 2'-O-methyluridine-3'-phosphate
  modified_base 19: mod_base = OTHER; note = 2'-O-methyluridine-3'-phosphate
  modified_base 20: mod_base = OTHER; note = 2'-fluoroguanosine-3'-phosphate
  modified_base 21: mod_base = OTHER; note = 2'-O-methyluridine-3'-phosphate N-[tris(GalNAc-alkyl)-amidodecanoyl)]-4-hydroxyprolinol Hyp-(GalNAc-alkyl)3
ctagacctgttttgcttttgt

SEQ ID NO: 320 - RNA, 23 nt, synthetic construct
  source 1..23: mol_type = other RNA; note = Description of Artificial Sequence: Synthetic oligonucleotide
  modified_base 1: mod_base = OTHER; note = 2'-O-methyladenosine-3'-phosphorothioate
  modified_base 2: mod_base = OTHER; note = 2'-fluorocytidine-3'-phosphorothioate
  modified_base 3: mod_base = OTHER; note = 2'-fluoroadenosine-3'-phosphate
  modified_base 4: mod_base = OTHER; note = 2'-fluoroadenosine-3'-phosphate
  modified_base 5: mod_base = OTHER; note = 2'-fluoroadenosine-3'-phosphate
  modified_base 6: mod_base = OTHER; note = 2'-fluoroadenosine-3'-phosphate
  modified_base 7: mod_base = OTHER; note = 2'-fluoroguanosine-3'-phosphate
  modified_base 8: mod_base = OTHER; note = 2'-O-methylcytidine-3'-phosphate
  modified_base 9: mod_base = OTHER; note = 2'-fluoroadenosine-3'-phosphate
  modified_base 10: mod_base = OTHER; note = 2'-fluoroadenosine-3'-phosphate
  modified_base 11: mod_base = OTHER; note = 2'-O-methyladenosine-3'-phosphate
  modified_base 12: mod_base = OTHER; note = 2'-O-methyladenosine-3'-phosphate
  modified_base 13: mod_base = OTHER; note = 2'-O-methylcytidine-3'-phosphate
  modified_base 14: mod_base = OTHER; note = 2'-fluoroadenosine-3'-phosphate
  modified_base 15: mod_base = OTHER; note = 2'-fluoroguanosine-3'-phosphate
  modified_base 16: mod_base = OTHER; note = 2'-fluoroguanosine-3'-phosphate
  modified_base 17: mod_base = OTHER; note = 2'-O-methyluridine-3'-phosphate
  modified_base 18: mod_base = OTHER; note = 2'-O-methylcytidine-3'-phosphate
  modified_base 19: mod_base = OTHER; note = 2'-O-methyluridine-3'-phosphate
  modified_base 20: mod_base = OTHER; note = 2'-fluoroadenosine-3'-phosphate
  modified_base 21: mod_base = OTHER; note = 2'-fluoroguanosine-3'-phosphorothioate
  modified_base 22: mod_base = OTHER; note = 2'-O-methyladenosine-3'-phosphorothioate
  modified_base 23: mod_base = OTHER; note = 2'-O-methyladenosine-3'-phosphate
acaaaagcaaaacaggtctagaa

SEQ ID NO: 321 - RNA, 21 nt, synthetic construct
  source 1..21: mol_type = other RNA; note = Description of Artificial Sequence: Synthetic oligonucleotide
  modified_base 1: mod_base = OTHER; note = 3'-O-methylcytidine-2'-phosphate
  modified_base 2: mod_base = OTHER; note = 2'-O-methyluridine-3'-phosphorothioate
  modified_base 3: mod_base = OTHER; note = 2'-fluoroadenosine-3'-phosphate
  modified_base 4: mod_base = OTHER; note = 2'-O-methylguanosine-3'-phosphate
  modified_base 5: mod_base = OTHER; note = 2'-fluoroadenosine-3'-phosphate
  modified_base 6: mod_base = OTHER; note = 2'-O-methylcytidine-3'-phosphate
  modified_base 7: mod_base = OTHER; note = 2'-fluorocytidine-3'-phosphate
  modified_base 8: mod_base = OTHER; note = 2'-O-methyluridine-3'-phosphate
  modified_base 9: mod_base = OTHER; note = 2'-fluoroguanosine-3'-phosphate
  modified_base 10: mod_base = OTHER; note = 2'-fluorouridine-3'-phosphate
  modified_base 11: mod_base = OTHER; note = 2'-fluorouridine-3'-phosphate
  modified_base 12: mod_base = OTHER; note = 2'-O-methyluridine-3'-phosphate
  modified_base 13: mod_base = OTHER; note = 2'-fluorouridine-3'-phosphate
  modified_base 14: mod_base = OTHER; note = 2'-O-methylguanosine-3'-phosphate
  modified_base 15: mod_base = OTHER; note = 2'-fluorocytidine-3'-phosphate
  modified_base 16: mod_base = OTHER; note = 2'-O-methyluridine-3'-phosphate
  modified_base 17: mod_base = OTHER; note = 2'-fluorouridine-3'-phosphate
  modified_base 18: mod_base = OTHER; note = 2'-O-methyluridine-3'-phosphate
  modified_base 19: mod_base = OTHER; note = 2'-fluorouridine-3'-phosphate
  modified_base 20: mod_base = OTHER; note = 2'-O-methylguanosine-3'-phosphate
  modified_base 21: mod_base = OTHER; note = 2'-fluorouridine-3'-phosphate N-[tris(GalNAc-alkyl)-amidodecanoyl)]-4-hydroxyprolinol Hyp-(GalNAc-alkyl)3
ctagacctgttttgcttttgt

SEQ ID NO: 322 - RNA, 23 nt, synthetic construct
  source 1..23: mol_type = other RNA; note = Description of Artificial Sequence: Synthetic oligonucleotide
  modified_base 1: mod_base = OTHER; note = 2'-O-methyladenosine-3'-phosphorothioate
  modified_base 2: mod_base = OTHER; note = 2'-fluorocytidine-3'-phosphorothioate
  modified_base 3: mod_base = OTHER; note = 2'-O-methyladenosine-3'-phosphate
  modified_base 4: mod_base = OTHER; note = 2'-fluoroadenosine-3'-phosphate
  modified_base 5: mod_base = OTHER; note = 2'-O-methyladenosine-3'-phosphate
  modified_base 6: mod_base = OTHER; note = 2'-fluoroadenosine-3'-phosphate
  modified_base 7: mod_base = OTHER; note = 2'-O-methylguanosine-3'-phosphate
  modified_base 8: mod_base = OTHER; note = 2'-fluorocytidine-3'-phosphate
  modified_base 9: mod_base = OTHER; note = 2'-O-methyladenosine-3'-phosphate
  modified_base 10: mod_base = OTHER; note = 2'-fluoroadenosine-3'-phosphate
  modified_base 11: mod_base = OTHER; note = 2'-O-methyladenosine-3'-phosphate
  modified_base 12: mod_base = OTHER; note = 2'-O-methyladenosine-3'-phosphate
  modified_base 13: mod_base = OTHER; note = 2'-O-methylcytidine-3'-phosphate
  modified_base 14: mod_base = OTHER; note = 2'-fluoroadenosine-3'-phosphate
  modified_base 15: mod_base = OTHER; note = 2'-O-methylguanosine-3'-phosphate
  modified_base 16: mod_base = OTHER; note = 2'-fluoroguanosine-3'-phosphate
  modified_base 17: mod_base = OTHER; note = 2'-O-methyluridine-3'-phosphate
  modified_base 18: mod_base = OTHER; note = 2'-fluorocytidine-3'-phosphate
  modified_base 19: mod_base = OTHER; note = 2'-O-methyluridine-3'-phosphate
  modified_base 20: mod_base = OTHER; note = 2'-fluoroadenosine-3'-phosphate
  modified_base 21: mod_base = OTHER; note = 2'-O-methylguanosine-3'-phosphorothioate
  modified_base 22: mod_base = OTHER; note = 2'-O-methyladenosine-3'-phosphorothioate
  modified_base 23: mod_base = OTHER; note = 2'-O-methyladenosine-3'-phosphate
acaaaagcaaaacaggtctagaa

SEQ ID NO: 323 - RNA, 21 nt, synthetic construct
  source 1..21: mol_type = other RNA; note = Description of Artificial Sequence: Synthetic oligonucleotide
  modified_base 1: mod_base = OTHER; note = 3'-O-methylcytidine-2'-phosphate
  modified_base 2: mod_base = OTHER; note = 3'-O-methyluridine-2'-phosphate
  modified_base 3: mod_base = OTHER; note = 2'-fluoroadenosine-3'-phosphate
  modified_base 4: mod_base = OTHER; note = 2'-O-methylguanosine-3'-phosphate
  modified_base 5: mod_base = OTHER; note = 2'-fluoroadenosine-3'-phosphate
  modified_base 6: mod_base = OTHER; note = 2'-O-methylcytidine-3'-phosphate
  modified_base 7: mod_base = OTHER; note = 2'-fluorocytidine-3'-phosphate
  modified_base 8: mod_base = OTHER; note = 2'-O-methyluridine-3'-phosphate
  modified_base 9: mod_base = OTHER; note = 2'-fluoroguanosine-3'-phosphate
  modified_base 10: mod_base = OTHER; note = 2'-fluorouridine-3'-phosphate
  modified_base 11: mod_base = OTHER; note = 2'-fluorouridine-3'-phosphate
  modified_base 12: mod_base = OTHER; note = 2'-O-methyluridine-3'-phosphate
  modified_base 13: mod_base = OTHER; note = 2'-fluorouridine-3'-phosphate
  modified_base 14: mod_base = OTHER; note = 2'-O-methylguanosine-3'-phosphate
  modified_base 15: mod_base = OTHER; note = 2'-fluorocytidine-3'-phosphate
  modified_base 16: mod_base = OTHER; note = 2'-O-methyluridine-3'-phosphate
  modified_base 17: mod_base = OTHER; note = 2'-fluorouridine-3'-phosphate
  modified_base 18: mod_base = OTHER; note = 2'-O-methyluridine-3'-phosphate
  modified_base 19: mod_base = OTHER; note = 2'-fluorouridine-3'-phosphate
  modified_base 20: mod_base = OTHER; note = 2'-O-methylguanosine-3'-phosphate
  modified_base 21: mod_base = OTHER; note = 2'-fluorouridine-3'-phosphate N-[tris(GalNAc-alkyl)-amidodecanoyl)]-4-hydroxyprolinol Hyp-(GalNAc-alkyl)3
ctagacctgttttgcttttgt

SEQ ID NO: 324 - RNA, 23 nt, synthetic construct
  source 1..23: mol_type = other RNA; note = Description of Artificial Sequence: Synthetic oligonucleotide
  modified_base 1: mod_base = OTHER; note = 2'-O-methyladenosine-3'-phosphorothioate
  modified_base 2: mod_base = OTHER; note = 2'-fluorocytidine-3'-phosphorothioate
  modified_base 3: mod_base = OTHER; note = 2'-O-methyladenosine-3'-phosphate
  modified_base 4: mod_base = OTHER; note = 2'-fluoroadenosine-3'-phosphate
  modified_base 5: mod_base = OTHER; note = 2'-O-methyladenosine-3'-phosphate
  modified_base 6: mod_base = OTHER; note = 2'-fluoroadenosine-3'-phosphate
  modified_base 7: mod_base = OTHER; note = 2'-O-methylguanosine-3'-phosphate
  modified_base 8: mod_base = OTHER; note = 2'-fluorocytidine-3'-phosphate
  modified_base 9: mod_base = OTHER; note = 2'-O-methyladenosine-3'-phosphate
  modified_base 10: mod_base = OTHER; note = 2'-fluoroadenosine-3'-phosphate
  modified_base 11: mod_base = OTHER; note = 2'-O-methyladenosine-3'-phosphate
  modified_base 12: mod_base = OTHER; note = 2'-O-methyladenosine-3'-phosphate
  modified_base 13: mod_base = OTHER; note = 2'-O-methylcytidine-3'-phosphate
  modified_base 14: mod_base = OTHER; note = 2'-fluoroadenosine-3'-phosphate
  modified_base 15: mod_base = OTHER; note = 2'-O-methylguanosine-3'-phosphate
  modified_base 16: mod_base = OTHER; note = 2'-fluoroguanosine-3'-phosphate
  modified_base 17: mod_base = OTHER; note = 2'-O-methyluridine-3'-phosphate
  modified_base 18: mod_base = OTHER; note = 2'-fluorocytidine-3'-phosphate
  modified_base 19: mod_base = OTHER; note = 2'-O-methyluridine-3'-phosphate
  modified_base 20: mod_base = OTHER; note = 2'-fluoroadenosine-3'-phosphate
  modified_base 21: mod_base = OTHER; note = 2'-O-methylguanosine-3'-phosphorothioate
  modified_base 22: mod_base = OTHER; note = 2'-O-methyladenosine-3'-phosphorothioate
  modified_base 23: mod_base = OTHER; note = 2'-O-methyladenosine-3'-phosphate
acaaaagcaaaacaggtctagaa

SEQ ID NO: 325 - RNA, 21 nt, synthetic construct
  source 1..21: mol_type = other RNA; note = Description of Artificial Sequence: Synthetic oligonucleotide
  modified_base 1: mod_base = OTHER; note 2'-O-(N-methylacetamide)-5-methylcytidine-3'-phosphate
  modified_base 2: mod_base = OTHER; note = 2'-O-methyluridine-3'-phosphorothioate
  modified_base 3: mod_base = OTHER; note = 2'-fluoroadenosine-3'-phosphate
  modified_base 4: mod_base = OTHER; note = 2'-O-methylguanosine-3'-phosphate
  modified_base 5: mod_base = OTHER; note = 2'-fluoroadenosine-3'-phosphate
  modified_base 6: mod_base = OTHER; note = 2'-O-methylcytidine-3'-phosphate
  modified_base 7: mod_base = OTHER; note = 2'-fluorocytidine-3'-phosphate
  modified_base 8: mod_base = OTHER; note = 2'-O-methyluridine-3'-phosphate
  modified_base 9: mod_base = OTHER; note = 2'-fluoroguanosine-3'-phosphate
  modified_base 10: mod_base = OTHER; note = 2'-fluorouridine-3'-phosphate
  modified_base 11: mod_base = OTHER; note = 2'-fluorouridine-3'-phosphate
  modified_base 12: mod_base = OTHER; note = 2'-O-methyluridine-3'-phosphate
  modified_base 13: mod_base = OTHER; note = 2'-fluorouridine-3'-phosphate
  modified_base 14: mod_base = OTHER; note = 2'-O-methylguanosine-3'-phosphate
  modified_base 15: mod_base = OTHER; note = 2'-fluorocytidine-3'-phosphate
  modified_base 16: mod_base = OTHER; note = 2'-O-methyluridine-3'-phosphate
  modified_base 17: mod_base = OTHER; note = 2'-fluorouridine-3'-phosphate
  modified_base 18: mod_base = OTHER; note = 2'-O-methyluridine-3'-phosphate
  modified_base 19: mod_base = OTHER; note = 2'-fluorouridine-3'-phosphate
  modified_base 20: mod_base = OTHER; note = 2'-O-methylguanosine-3'-phosphate
  modified_base 21: mod_base = OTHER; note = 2'-fluorouridine-3'-phosphate N-[tris(GalNAc-alkyl)-amidodecanoyl)]-4-hydroxyprolinol Hyp-(GalNAc-alkyl)3
ctagacctgttttgcttttgt

SEQ ID NO: 326 - RNA, 23 nt, synthetic construct
  source 1..23: mol_type = other RNA; note = Description of Artificial Sequence: Synthetic oligonucleotide
  modified_base 1: mod_base = OTHER; note = 2'-O-methyladenosine-3'-phosphorothioate
  modified_base 2: mod_base = OTHER; note = 2'-fluorocytidine-3'-phosphorothioate
  modified_base 3: mod_base = OTHER; note = 2'-O-methyladenosine-3'-phosphate
  modified_base 4: mod_base = OTHER; note = 2'-fluoroadenosine-3'-phosphate
  modified_base 5: mod_base = OTHER; note = 2'-O-methyladenosine-3'-phosphate
  modified_base 6: mod_base = OTHER; note = 2'-fluoroadenosine-3'-phosphate
  modified_base 7: mod_base = OTHER; note = 2'-O-methylguanosine-3'-phosphate
  modified_base 8: mod_base = OTHER; note = 2'-fluorocytidine-3'-phosphate
  modified_base 9: mod_base = OTHER; note = 2'-O-methyladenosine-3'-phosphate
  modified_base 10: mod_base = OTHER; note = 2'-fluoroadenosine-3'-phosphate
  modified_base 11: mod_base = OTHER; note = 2'-O-methyladenosine-3'-phosphate
  modified_base 12: mod_base = OTHER; note = 2'-O-methyladenosine-3'-phosphate
  modified_base 13: mod_base = OTHER; note = 2'-O-methylcytidine-3'-phosphate
  modified_base 14: mod_base = OTHER; note = 2'-fluoroadenosine-3'-phosphate
  modified_base 15: mod_base = OTHER; note = 2'-O-methylguanosine-3'-phosphate
  modified_base 16: mod_base = OTHER; note = 2'-fluoroguanosine-3'-phosphate
  modified_base 17: mod_base = OTHER; note = 2'-O-methyluridine-3'-phosphate
  modified_base 18: mod_base = OTHER; note = 2'-fluorocytidine-3'-phosphate
  modified_base 19: mod_base = OTHER; note = 2'-O-methyluridine-3'-phosphate
  modified_base 20: mod_base = OTHER; note = 2'-fluoroadenosine-3'-phosphate
  modified_base 21: mod_base = OTHER; note = 2'-O-methylguanosine-3'-phosphorothioate
  modified_base 22: mod_base = OTHER; note = 2'-O-methyladenosine-3'-phosphorothioate
  modified_base 23: mod_base = OTHER; note = 2'-O-methyladenosine-3'-phosphate
acaaaagcaaaacaggtctagaa

SEQ ID NO: 327 - RNA, 21 nt, synthetic construct
  source 1..21: mol_type = other RNA; note = Description of Artificial Sequence: Synthetic oligonucleotide; note = Description of Combined DNA/RNA Molecule: Synthetic oligonucleotide
  modified_base 1: mod_base = OTHER; note 2'-O-(N-methylacetamide)-5-methylcytidine-3'-phosphate
  modified_base 2: mod_base = OTHER; note = 2'-O-(N-methylacetamide)thymidine-3'-phosphate
  modified_base 3: mod_base = OTHER; note = 2'-fluoroadenosine-3'-phosphate
  modified_base 4: mod_base = OTHER; note = 2'-O-methylguanosine-3'-phosphate
  modified_base 5: mod_base = OTHER; note = 2'-fluoroadenosine-3'-phosphate
  modified_base 6: mod_base = OTHER; note = 2'-O-methylcytidine-3'-phosphate
  modified_base 7: mod_base = OTHER; note = 2'-fluorocytidine-3'-phosphate
  modified_base 8: mod_base = OTHER; note = 2'-O-methyluridine-3'-phosphate
  modified_base 9: mod_base = OTHER; note = 2'-fluoroguanosine-3'-phosphate
  modified_base 10: mod_base = OTHER; note = 2'-fluorouridine-3'-phosphate
  modified_base 11: mod_base = OTHER; note = 2'-fluorouridine-3'-phosphate
  modified_base 12: mod_base = OTHER; note = 2'-O-methyluridine-3'-phosphate
  modified_base 13: mod_base = OTHER; note = 2'-fluorouridine-3'-phosphate
  modified_base 14: mod_base = OTHER; note = 2'-O-methylguanosine-3'-phosphate
  modified_base 15: mod_base = OTHER; note = 2'-fluorocytidine-3'-phosphate
  modified_base 16: mod_base = OTHER; note = 2'-O-methyluridine-3'-phosphate
  modified_base 17: mod_base = OTHER; note = 2'-fluorouridine-3'-phosphate
  modified_base 18: mod_base = OTHER; note = 2'-O-methyluridine-3'-phosphate
  modified_base 19: mod_base = OTHER; note = 2'-fluorouridine-3'-phosphate
  modified_base 20: mod_base = OTHER; note = 2'-O-methylguanosine-3'-phosphate
  modified_base 21: mod_base = OTHER; note = 2'-fluorouridine-3'-phosphate N-[tris(GalNAc-alkyl)-amidodecanoyl)]-4-hydroxyprolinol Hyp-(GalNAc-alkyl)3
ctagacctgttttgcttttgt

SEQ ID NO: 328 - RNA, 23 nt, synthetic construct
  source 1..23: mol_type = other RNA; note = Description of Artificial Sequence: Synthetic oligonucleotide
  modified_base 1: mod_base = OTHER; note = 2'-O-methyladenosine-3'-phosphorothioate
  modified_base 2: mod_base = OTHER; note = 2'-fluorocytidine-3'-phosphorothioate
  modified_base 3: mod_base = OTHER; note = 2'-O-methyladenosine-3'-phosphate
  modified_base 4: mod_base = OTHER; note = 2'-fluoroadenosine-3'-phosphate
  modified_base 5: mod_base = OTHER; note = 2'-O-methyladenosine-3'-phosphate
  modified_base 6: mod_base = OTHER; note = 2'-fluoroadenosine-3'-phosphate
  modified_base 7: mod_base = OTHER; note = 2'-O-methylguanosine-3'-phosphate
  modified_base 8: mod_base = OTHER; note = 2'-fluorocytidine-3'-phosphate
  modified_base 9: mod_base = OTHER; note = 2'-O-methyladenosine-3'-phosphate
  modified_base 10: mod_base = OTHER; note = 2'-fluoroadenosine-3'-phosphate
  modified_base 11: mod_base = OTHER; note = 2'-O-methyladenosine-3'-phosphate
  modified_base 12: mod_base = OTHER; note = 2'-O-methyladenosine-3'-phosphate
  modified_base 13: mod_base = OTHER; note = 2'-O-methylcytidine-3'-phosphate
  modified_base 14: mod_base = OTHER; note = 2'-fluoroadenosine-3'-phosphate
  modified_base 15: mod_base = OTHER; note = 2'-O-methylguanosine-3'-phosphate
  modified_base 16: mod_base = OTHER; note = 2'-fluoroguanosine-3'-phosphate
  modified_base 17: mod_base = OTHER; note = 2'-O-methyluridine-3'-phosphate
  modified_base 18: mod_base = OTHER; note = 2'-fluorocytidine-3'-phosphate
  modified_base 19: mod_base = OTHER; note = 2'-O-methyluridine-3'-phosphate
  modified_base 20: mod_base = OTHER; note = 2'-fluoroadenosine-3'-phosphate
  modified_base 21: mod_base = OTHER; note = 2'-O-methylguanosine-3'-phosphorothioate
  modified_base 22: mod_base = OTHER; note = 2'-O-methyladenosine-3'-phosphorothioate
  modified_base 23: mod_base = OTHER; note = 2'-O-methyladenosine-3'-phosphate
acaaaagcaaaacaggtctagaa

SEQ ID NO: 329 - RNA, 21 nt, synthetic construct
  source 1..21: mol_type = other RNA; note = Description of Artificial Sequence: Synthetic oligonucleotide; note = Description of Combined DNA/RNA Molecule: Synthetic oligonucleotide
  modified_base 1: mod_base = OTHER; note 2'-O-(N-methylacetamide)-5-methylcytidine-3'-phosphorothioa te
  modified_base 2: mod_base = OTHER; note = 2'-O-(N-methylacetamide)thymidine-3'-phosphorothioate
  modified_base 3: mod_base = OTHER; note = 2'-fluoroadenosine-3'-phosphate
  modified_base 4: mod_base = OTHER; note = 2'-O-methylguanosine-3'-phosphate
  modified_base 5: mod_base = OTHER; note = 2'-fluoroadenosine-3'-phosphate
  modified_base 6: mod_base = OTHER; note = 2'-O-methylcytidine-3'-phosphate
  modified_base 7: mod_base = OTHER; note = 2'-fluorocytidine-3'-phosphate
  modified_base 8: mod_base = OTHER; note = 2'-O-methyluridine-3'-phosphate
  modified_base 9: mod_base = OTHER; note = 2'-fluoroguanosine-3'-phosphate
  modified_base 10: mod_base = OTHER; note = 2'-fluorouridine-3'-phosphate
  modified_base 11: mod_base = OTHER; note = 2'-fluorouridine-3'-phosphate
  modified_base 12: mod_base = OTHER; note = 2'-O-methyluridine-3'-phosphate
  modified_base 13: mod_base = OTHER; note = 2'-fluorouridine-3'-phosphate
  modified_base 14: mod_base = OTHER; note = 2'-O-methylguanosine-3'-phosphate
  modified_base 15: mod_base = OTHER; note = 2'-fluorocytidine-3'-phosphate
  modified_base 16: mod_base = OTHER; note = 2'-O-methyluridine-3'-phosphate
  modified_base 17: mod_base = OTHER; note = 2'-fluorouridine-3'-phosphate
  modified_base 18: mod_base = OTHER; note = 2'-O-methyluridine-3'-phosphate
  modified_base 19: mod_base = OTHER; note = 2'-fluorouridine-3'-phosphate
  modified_base 20: mod_base = OTHER; note = 2'-O-methylguanosine-3'-phosphate
  modified_base 21: mod_base = OTHER; note = 2'-fluorouridine-3'-phosphate N-[tris(GalNAc-alkyl)-amidodecanoyl)]-4-hydroxyprolinol Hyp-(GalNAc-alkyl)3
ctagacctgttttgcttttgt

SEQ ID NO: 330 - RNA, 23 nt, synthetic construct
  source 1..23: mol_type = other RNA; note = Description of Artificial Sequence: Synthetic oligonucleotide
  modified_base 1: mod_base = OTHER; note = 2'-O-methyladenosine-3'-phosphorothioate
  modified_base 2: mod_base = OTHER; note = 2'-fluorocytidine-3'-phosphorothioate
  modified_base 3: mod_base = OTHER; note = 2'-O-methyladenosine-3'-phosphate
  modified_base 4: mod_base = OTHER; note = 2'-fluoroadenosine-3'-phosphate
  modified_base 5: mod_base = OTHER; note = 2'-O-methyladenosine-3'-phosphate
  modified_base 6: mod_base = OTHER; note = 2'-fluoroadenosine-3'-phosphate
  modified_base 7: mod_base = OTHER; note = 2'-O-methylguanosine-3'-phosphate
  modified_base 8: mod_base = OTHER; note = 2'-fluorocytidine-3'-phosphate
  modified_base 9: mod_base = OTHER; note = 2'-O-methyladenosine-3'-phosphate
  modified_base 10: mod_base = OTHER; note = 2'-fluoroadenosine-3'-phosphate
  modified_base 11: mod_base = OTHER; note = 2'-O-methyladenosine-3'-phosphate
  modified_base 12: mod_base = OTHER; note = 2'-O-methyladenosine-3'-phosphate
  modified_base 13: mod_base = OTHER; note = 2'-O-methylcytidine-3'-phosphate
  modified_base 14: mod_base = OTHER; note = 2'-fluoroadenosine-3'-phosphate
  modified_base 15: mod_base = OTHER; note = 2'-O-methylguanosine-3'-phosphate
  modified_base 16: mod_base = OTHER; note = 2'-fluoroguanosine-3'-phosphate
  modified_base 17: mod_base = OTHER; note = 2'-O-methyluridine-3'-phosphate
  modified_base 18: mod_base = OTHER; note = 2'-fluorocytidine-3'-phosphate
  modified_base 19: mod_base = OTHER; note = 2'-O-methyluridine-3'-phosphate
  modified_base 20: mod_base = OTHER; note = 2'-fluoroadenosine-3'-phosphate
  modified_base 21: mod_base = OTHER; note = 2'-O-methylguanosine-3'-phosphorothioate
  modified_base 22: mod_base = OTHER; note = 2'-O-methyladenosine-3'-phosphorothioate
  modified_base 23: mod_base = OTHER; note = 2'-O-methyladenosine-3'-phosphate
acaaaagcaaaacaggtctagaa

SEQ ID NO: 331 - RNA, 21 nt, synthetic construct
  source 1..21: mol_type = other RNA; note = Description of Artificial Sequence: Synthetic oligonucleotide
  modified_base 1: mod_base = OTHER; note 2'-O-(N-methylacetamide)-5-methylcytidine-3'-phosphorothioa te
  modified_base 2: mod_base = OTHER; note = 2'-O-methyluridine-3'-phosphorothioate
  modified_base 3: mod_base = OTHER; note = 2'-fluoroadenosine-3'-phosphate
  modified_base 4: mod_base = OTHER; note = 2'-O-methylguanosine-3'-phosphate
  modified_base 5: mod_base = OTHER; note = 2'-fluoroadenosine-3'-phosphate
  modified_base 6: mod_base = OTHER; note = 2'-O-methylcytidine-3'-phosphate
  modified_base 7: mod_base = OTHER; note = 2'-fluorocytidine-3'-phosphate
  modified_base 8: mod_base = OTHER; note = 2'-O-methyluridine-3'-phosphate
  modified_base 9: mod_base = OTHER; note = 2'-fluoroguanosine-3'-phosphate
  modified_base 10: mod_base = OTHER; note = 2'-fluorouridine-3'-phosphate
  modified_base 11: mod_base = OTHER; note = 2'-fluorouridine-3'-phosphate
  modified_base 12: mod_base = OTHER; note = 2'-O-methyluridine-3'-phosphate
  modified_base 13: mod_base = OTHER; note = 2'-fluorouridine-3'-phosphate
  modified_base 14: mod_base = OTHER; note = 2'-O-methylguanosine-3'-phosphate
  modified_base 15: mod_base = OTHER; note = 2'-fluorocytidine-3'-phosphate
  modified_base 16: mod_base = OTHER; note = 2'-O-methyluridine-3'-phosphate
  modified_base 17: mod_base = OTHER; note = 2'-fluorouridine-3'-phosphate
  modified_base 18: mod_base = OTHER; note = 2'-O-methyluridine-3'-phosphate
  modified_base 19: mod_base = OTHER; note = 2'-fluorouridine-3'-phosphate
  modified_base 20: mod_base = OTHER; note = 2'-O-methylguanosine-3'-phosphate
  modified_base 21: mod_base = OTHER; note = 2'-fluorouridine-3'-phosphate N-[tris(GalNAc-alkyl)-amidodecanoyl)]-4-hydroxyprolinol Hyp-(GalNAc-alkyl)3
ctagacctgttttgcttttgt

SEQ ID NO: 332 - RNA, 23 nt, synthetic construct
  source 1..23: mol_type = other RNA; note = Description of Artificial Sequence: Synthetic oligonucleotide
  modified_base 1: mod_base = OTHER; note = 2'-O-methyladenosine-3'-phosphorothioate
  modified_base 2: mod_base = OTHER; note = 2'-fluorocytidine-3'-phosphorothioate
  modified_base 3: mod_base = OTHER; note = 2'-O-methyladenosine-3'-phosphate
  modified_base 4: mod_base = OTHER; note = 2'-fluoroadenosine-3'-phosphate
  modified_base 5: mod_base = OTHER; note = 2'-O-methyladenosine-3'-phosphate
  modified_base 6: mod_base = OTHER; note = 2'-fluoroadenosine-3'-phosphate
  modified_base 7: mod_base = OTHER; note = 2'-O-methylguanosine-3'-phosphate
  modified_base 8: mod_base = OTHER; note = 2'-fluorocytidine-3'-phosphate
  modified_base 9: mod_base = OTHER; note = 2'-O-methyladenosine-3'-phosphate
  modified_base 10: mod_base = OTHER; note = 2'-fluoroadenosine-3'-phosphate
  modified_base 11: mod_base = OTHER; note = 2'-O-methyladenosine-3'-phosphate
  modified_base 12: mod_base = OTHER; note = 2'-O-methyladenosine-3'-phosphate
  modified_base 13: mod_base = OTHER; note = 2'-O-methylcytidine-3'-phosphate
  modified_base 14: mod_base = OTHER; note = 2'-fluoroadenosine-3'-phosphate
  modified_base 15: mod_base = OTHER; note = 2'-O-methylguanosine-3'-phosphate
  modified_base 16: mod_base = OTHER; note = 2'-fluoroguanosine-3'-phosphate
  modified_base 17: mod_base = OTHER; note = 2'-O-methyluridine-3'-phosphate
  modified_base 18: mod_base = OTHER; note = 2'-fluorocytidine-3'-phosphate
  modified_base 19: mod_base = OTHER; note = 2'-O-methyluridine-3'-phosphate
  modified_base 20: mod_base = OTHER; note = 2'-fluoroadenosine-3'-phosphate
  modified_base 21: mod_base = OTHER; note = 2'-O-methylguanosine-3'-phosphorothioate
  modified_base 22: mod_base = OTHER; note = 2'-O-methyladenosine-3'-phosphorothioate
  modified_base 23: mod_base = OTHER; note = 2'-O-methyladenosine-3'-phosphate
acaaaagcaaaacaggtctagaa

SEQ ID NO: 333 - RNA, 21 nt, synthetic construct
  source 1..21: mol_type = other RNA; note = Description of Artificial Sequence: Synthetic oligonucleotide
  modified_base 1: mod_base = OTHER; note = 2'-fluorocytidine-3'-phosphorothioate
  modified_base 2: mod_base = OTHER; note = 2'-O-methyluridine-3'-phosphorothioate
  modified_base 3: mod_base = OTHER; note = 2'-fluoroadenosine-3'-phosphate
  modified_base 4: mod_base = OTHER; note = 2'-O-methylguanosine-3'-phosphate
  modified_base 5: mod_base = OTHER; note = 2'-fluoroadenosine-3'-phosphate
  modified_base 6: mod_base = OTHER; note = 2'-O-methylcytidine-3'-phosphate
  modified_base 7: mod_base = OTHER; note = 2'-fluorocytidine-3'-phosphate
  modified_base 8: mod_base = OTHER; note = 2'-O-methyluridine-3'-phosphate
  modified_base 9: mod_base = OTHER; note = 2'-fluoroguanosine-3'-phosphate
  modified_base 10: mod_base = OTHER; note = 2'-fluorouridine-3'-phosphate
  modified_base 11: mod_base = OTHER; note = 2'-fluorouridine-3'-phosphate
  modified_base 12: mod_base = OTHER; note = 2'-O-methyluridine-3'-phosphate
  modified_base 13: mod_base = OTHER; note = 2'-fluorouridine-3'-phosphate
  modified_base 14: mod_base = OTHER; note = 2'-O-methylguanosine-3'-phosphate
  modified_base 15: mod_base = OTHER; note = 2'-fluorocytidine-3'-phosphate
  modified_base 16: mod_base = OTHER; note = 2'-O-methyluridine-3'-phosphate
  modified_base 17: mod_base = OTHER; note = 2'-fluorouridine-3'-phosphate
  modified_base 18: mod_base = OTHER; note = 2'-O-methyluridine-3'-phosphate
  modified_base 19: mod_base = OTHER; note = 2'-fluorouridine-3'-phosphate
  modified_base 20: mod_base = OTHER; note = 2'-O-methylguanosine-3'-phosphate
  modified_base 21: mod_base = OTHER; note = 2'-fluorouridine-3'-phosphate N-[tris(GalNAc-alkyl)-amidodecanoyl)]-4-hydroxyprolinol Hyp-(GalNAc-alkyl)3
ctagacctgttttgcttttgt

SEQ ID NO: 334 - RNA, 23 nt, synthetic construct
  source 1..23: mol_type = other RNA; note = Description of Artificial Sequence: Synthetic oligonucleotide
  modified_base 1: mod_base = OTHER; note = 2'-O-methyladenosine-3'-phosphorothioate
  modified_base 2: mod_base = OTHER; note = 2'-fluorocytidine-3'-phosphorothioate
  modified_base 3: mod_base = OTHER; note = 2'-O-methyladenosine-3'-phosphate
  modified_base 4: mod_base = OTHER; note = 2'-fluoroadenosine-3'-phosphate
  modified_base 5: mod_base = OTHER; note = 2'-O-methyladenosine-3'-phosphate
  modified_base 6: mod_base = OTHER; note = 2'-fluoroadenosine-3'-phosphate
  modified_base 7: mod_base = OTHER; note = 2'-O-methylguanosine-3'-phosphate
  modified_base 8: mod_base = OTHER; note = 2'-fluorocytidine-3'-phosphate
  modified_base 9: mod_base = OTHER; note = 2'-O-methyladenosine-3'-phosphate
  modified_base 10: mod_base = OTHER; note = 2'-fluoroadenosine-3'-phosphate
  modified_base 11: mod_base = OTHER; note = 2'-O-methyladenosine-3'-phosphate
  modified_base 12: mod_base = OTHER; note = 2'-O-methyladenosine-3'-phosphate
  modified_base 13: mod_base = OTHER; note = 2'-O-methylcytidine-3'-phosphate
  modified_base 14: mod_base = OTHER; note = 2'-fluoroadenosine-3'-phosphate
  modified_base 15: mod_base = OTHER; note = 2'-O-methylguanosine-3'-phosphate
  modified_base 16: mod_base = OTHER; note = 2'-fluoroguanosine-3'-phosphate
  modified_base 17: mod_base = OTHER; note = 2'-O-methyluridine-3'-phosphate
  modified_base 18: mod_base = OTHER; note = 2'-fluorocytidine-3'-phosphate
  modified_base 19: mod_base = OTHER; note = 2'-O-methyluridine-3'-phosphate
  modified_base 20: mod_base = OTHER; note = 2'-fluoroadenosine-3'-phosphate
  modified_base 21: mod_base = OTHER; note = 2'-O-methylguanosine-3'-phosphorothioate
  modified_base 22: mod_base = OTHER; note = 3'-O-methyladenosine-2'-phosphate
  modified_base 23: mod_base = OTHER; note = 2'-O-methyladenosine-3'-phosphate
acaaaagcaaaacaggtctagaa

SEQ ID NO: 335 - RNA, 21 nt, synthetic construct
  source 1..21: mol_type = other RNA; note = Description of Artificial Sequence: Synthetic oligonucleotide
  modified_base 1: mod_base = OTHER; note = 2'-fluorocytidine-3'-phosphorothioate
  modified_base 2: mod_base = OTHER; note = 2'-O-methyluridine-3'-phosphorothioate
  modified_base 3: mod_base = OTHER; note = 2'-fluoroadenosine-3'-phosphate
  modified_base 4: mod_base = OTHER; note = 2'-O-methylguanosine-3'-phosphate
  modified_base 5: mod_base = OTHER; note = 2'-fluoroadenosine-3'-phosphate
  modified_base 6: mod_base = OTHER; note = 2'-O-methylcytidine-3'-phosphate
  modified_base 7: mod_base = OTHER; note = 2'-fluorocytidine-3'-phosphate
  modified_base 8: mod_base = OTHER; note = 2'-O-methyluridine-3'-phosphate
  modified_base 9: mod_base = OTHER; note = 2'-fluoroguanosine-3'-phosphate
  modified_base 10: mod_base = OTHER; note = 2'-fluorouridine-3'-phosphate
  modified_base 11: mod_base = OTHER; note = 2'-fluorouridine-3'-phosphate
  modified_base 12: mod_base = OTHER; note = 2'-O-methyluridine-3'-phosphate
  modified_base 13: mod_base = OTHER; note = 2'-fluorouridine-3'-phosphate
  modified_base 14: mod_base = OTHER; note = 2'-O-methylguanosine-3'-phosphate
  modified_base 15: mod_base = OTHER; note = 2'-fluorocytidine-3'-phosphate
  modified_base 16: mod_base = OTHER; note = 2'-O-methyluridine-3'-phosphate
  modified_base 17: mod_base = OTHER; note = 2'-fluorouridine-3'-phosphate
  modified_base 18: mod_base = OTHER; note = 2'-O-methyluridine-3'-phosphate
  modified_base 19: mod_base = OTHER; note = 2'-fluorouridine-3'-phosphate
  modified_base 20: mod_base = OTHER; note = 2'-O-methylguanosine-3'-phosphate
  modified_base 21: mod_base = OTHER; note = 2'-fluorouridine-3'-phosphate N-[tris(GalNAc-alkyl)-amidodecanoyl)]-4-hydroxyprolinol Hyp-(GalNAc-alkyl)3
ctagacctgttttgcttttgt

SEQ ID NO: 336 - RNA, 23 nt, synthetic construct
  source 1..23: mol_type = other RNA; note = Description of Artificial Sequence: Synthetic oligonucleotide
  modified_base 1: mod_base = OTHER; note = 2'-O-methyladenosine-3'-phosphorothioate
  modified_base 2: mod_base = OTHER; note = 2'-fluorocytidine-3'-phosphorothioate
  modified_base 3: mod_base = OTHER; note = 2'-O-methyladenosine-3'-phosphate
  modified_base 4: mod_base = OTHER; note = 2'-fluoroadenosine-3'-phosphate
  modified_base 5: mod_base = OTHER; note = 2'-O-methyladenosine-3'-phosphate
  modified_base 6: mod_base = OTHER; note = 2'-fluoroadenosine-3'-phosphate
  modified_base 7: mod_base = OTHER; note = 2'-O-methylguanosine-3'-phosphate
  modified_base 8: mod_base = OTHER; note = 2'-fluorocytidine-3'-phosphate
  modified_base 9: mod_base = OTHER; note = 2'-O-methyladenosine-3'-phosphate
  modified_base 10: mod_base = OTHER; note = 2'-fluoroadenosine-3'-phosphate
  modified_base 11: mod_base = OTHER; note = 2'-O-methyladenosine-3'-phosphate
  modified_base 12: mod_base = OTHER; note = 2'-O-methyladenosine-3'-phosphate
  modified_base 13: mod_base = OTHER; note = 2'-O-methylcytidine-3'-phosphate
  modified_base 14: mod_base = OTHER; note = 2'-fluoroadenosine-3'-phosphate
  modified_base 15: mod_base = OTHER; note = 2'-O-methylguanosine-3'-phosphate
  modified_base 16: mod_base = OTHER; note = 2'-fluoroguanosine-3'-phosphate
  modified_base 17: mod_base = OTHER; note = 2'-O-methyluridine-3'-phosphate
  modified_base 18: mod_base = OTHER; note = 2'-fluorocytidine-3'-phosphate
  modified_base 19: mod_base = OTHER; note = 2'-O-methyluridine-3'-phosphate
  modified_base 20: mod_base = OTHER; note = 2'-fluoroadenosine-3'-phosphate
  modified_base 21: mod_base = OTHER; note = 3'-O-methylguanosine-2'-phosphate
  modified_base 22: mod_base = OTHER; note = 3'-O-methyladenosine-2'-phosphate
  modified_base 23: mod_base = OTHER; note = 2'-O-methyladenosine-3'-phosphate
acaaaagcaaaacaggtctagaa

SEQ ID NO: 337 - RNA, 21 nt, synthetic construct
  source 1..21: mol_type = other RNA; note = Description of Artificial Sequence: Synthetic oligonucleotide
  modified_base 1: mod_base = OTHER; note = 2'-fluorocytidine-3'-phosphorothioate
  modified_base 2: mod_base = OTHER; note = 2'-O-methyluridine-3'-phosphorothioate
  modified_base 3: mod_base = OTHER; note = 2'-fluoroadenosine-3'-phosphate
  modified_base 4: mod_base = OTHER; note = 2'-O-methylguanosine-3'-phosphate
  modified_base 5: mod_base = OTHER; note = 2'-fluoroadenosine-3'-phosphate
  modified_base 6: mod_base = OTHER; note = 2'-O-methylcytidine-3'-phosphate
  modified_base 7: mod_base = OTHER; note = 2'-fluorocytidine-3'-phosphate
  modified_base 8: mod_base = OTHER; note = 2'-O-methyluridine-3'-phosphate
  modified_base 9: mod_base = OTHER; note = 2'-fluoroguanosine-3'-phosphate
  modified_base 10: mod_base = OTHER; note = 2'-fluorouridine-3'-phosphate
  modified_base 11: mod_base = OTHER; note = 2'-fluorouridine-3'-phosphate
  modified_base 12: mod_base = OTHER; note = 2'-O-methyluridine-3'-phosphate
  modified_base 13: mod_base = OTHER; note = 2'-fluorouridine-3'-phosphate
  modified_base 14: mod_base = OTHER; note = 2'-O-methylguanosine-3'-phosphate
  modified_base 15: mod_base = OTHER; note = 2'-fluorocytidine-3'-phosphate
  modified_base 16: mod_base = OTHER; note = 2'-O-methyluridine-3'-phosphate
  modified_base 17: mod_base = OTHER; note = 2'-fluorouridine-3'-phosphate
  modified_base 18: mod_base = OTHER; note = 2'-O-methyluridine-3'-phosphate
  modified_base 19: mod_base = OTHER; note = 2'-fluorouridine-3'-phosphate
  modified_base 20: mod_base = OTHER; note = 2'-O-methylguanosine-3'-phosphate
  modified_base 21: mod_base = OTHER; note = 2'-fluorouridine-3'-phosphate N-[tris(GalNAc-alkyl)-amidodecanoyl)]-4-hydroxyprolinol Hyp-(GalNAc-alkyl)3
ctagacctgttttgcttttgt

SEQ ID NO: 338 - RNA, 23 nt, synthetic construct
  source 1..23: mol_type = other RNA; note = Description of Artificial Sequence: Synthetic oligonucleotide
  modified_base 1: mod_base = OTHER; note = 2'-O-methyladenosine-3'-phosphorothioate
  modified_base 2: mod_base = OTHER; note = 2'-fluorocytidine-3'-phosphorothioate
  modified_base 3: mod_base = OTHER; note = 2'-O-methyladenosine-3'-phosphate
  modified_base 4: mod_base = OTHER; note = 2'-fluoroadenosine-3'-phosphate
  modified_base 5: mod_base = OTHER; note = 2'-O-methyladenosine-3'-phosphate
  modified_base 6: mod_base = OTHER; note = 2'-fluoroadenosine-3'-phosphate
  modified_base 7: mod_base = OTHER; note = 2'-O-methylguanosine-3'-phosphate
  modified_base 8: mod_base = OTHER; note = 2'-fluorocytidine-3'-phosphate
  modified_base 9: mod_base = OTHER; note = 2'-O-methyladenosine-3'-phosphate
  modified_base 10: mod_base = OTHER; note = 2'-fluoroadenosine-3'-phosphate
  modified_base 11: mod_base = OTHER; note = 2'-O-methyladenosine-3'-phosphate
  modified_base 12: mod_base = OTHER; note = 2'-O-methyladenosine-3'-phosphate
  modified_base 13: mod_base = OTHER; note = 2'-O-methylcytidine-3'-phosphate
  modified_base 14: mod_base = OTHER; note = 2'-fluoroadenosine-3'-phosphate
  modified_base 15: mod_base = OTHER; note = 2'-O-methylguanosine-3'-phosphate
  modified_base 16: mod_base = OTHER; note = 2'-fluoroguanosine-3'-phosphate
  modified_base 17: mod_base = OTHER; note = 2'-O-methyluridine-3'-phosphate
  modified_base 18: mod_base = OTHER; note = 2'-fluorocytidine-3'-phosphate
  modified_base 19: mod_base = OTHER; note = 2'-O-methyluridine-3'-phosphate
  modified_base 20: mod_base = OTHER; note = 2'-fluoroadenosine-3'-phosphate
  modified_base 21: mod_base = OTHER; note = 2'-O-methylguanosine-3'-phosphorothioate
  modified_base 22: mod_base = OTHER; note = 2'-O-(N-methylacetamide)adenosine-3'-phosphate
  modified_base 23: mod_base = OTHER; note = 2'-O-methyladenosine-3'-phosphate
acaaaagcaaaacaggtctagaa

SEQ ID NO: 339 - RNA, 21 nt, synthetic construct
  source 1..21: mol_type = other RNA; note = Description of Artificial Sequence: Synthetic oligonucleotide
  modified_base 1: mod_base = OTHER; note = 2'-fluorocytidine-3'-phosphorothioate
  modified_base 2: mod_base = OTHER; note = 2'-O-methyluridine-3'-phosphorothioate
  modified_base 3: mod_base = OTHER; note = 2'-fluoroadenosine-3'-phosphate
  modified_base 4: mod_base = OTHER; note = 2'-O-methylguanosine-3'-phosphate
  modified_base 5: mod_base = OTHER; note = 2'-fluoroadenosine-3'-phosphate
  modified_base 6: mod_base = OTHER; note = 2'-O-methylcytidine-3'-phosphate
  modified_base 7: mod_base = OTHER; note = 2'-fluorocytidine-3'-phosphate
  modified_base 8: mod_base = OTHER; note = 2'-O-methyluridine-3'-phosphate
  modified_base 9: mod_base = OTHER; note = 2'-fluoroguanosine-3'-phosphate
  modified_base 10: mod_base = OTHER; note = 2'-fluorouridine-3'-phosphate
  modified_base 11: mod_base = OTHER; note = 2'-fluorouridine-3'-phosphate
  modified_base 12: mod_base = OTHER; note = 2'-O-methyluridine-3'-phosphate
  modified_base 13: mod_base = OTHER; note = 2'-fluorouridine-3'-phosphate
  modified_base 14: mod_base = OTHER; note = 2'-O-methylguanosine-3'-phosphate
  modified_base 15: mod_base = OTHER; note = 2'-fluorocytidine-3'-phosphate
  modified_base 16: mod_base = OTHER; note = 2'-O-methyluridine-3'-phosphate
  modified_base 17: mod_base = OTHER; note = 2'-fluorouridine-3'-phosphate
  modified_base 18: mod_base = OTHER; note = 2'-O-methyluridine-3'-phosphate
  modified_base 19: mod_base = OTHER; note = 2'-fluorouridine-3'-phosphate
  modified_base 20: mod_base = OTHER; note = 2'-O-methylguanosine-3'-phosphate
  modified_base 21: mod_base = OTHER; note = 2'-fluorouridine-3'-phosphate N-[tris(GalNAc-alkyl)-amidodecanoyl)]-4-hydroxyprolinol Hyp-(GalNAc-alkyl)3
ctagacctgttttgcttttgt

SEQ ID NO: 340 - RNA, 23 nt, synthetic construct
  source 1..23: mol_type = other RNA; note = Description of Artificial Sequence: Synthetic oligonucleotide
  modified_base 1: mod_base = OTHER; note = 2'-O-methyladenosine-3'-phosphorothioate
  modified_base 2: mod_base = OTHER; note = 2'-fluorocytidine-3'-phosphorothioate
  modified_base 3: mod_base = OTHER; note = 2'-O-methyladenosine-3'-phosphate
  modified_base 4: mod_base = OTHER; note = 2'-fluoroadenosine-3'-phosphate
  modified_base 5: mod_base = OTHER; note = 2'-O-methyladenosine-3'-phosphate
  modified_base 6: mod_base = OTHER; note = 2'-fluoroadenosine-3'-phosphate
  modified_base 7: mod_base = OTHER; note = 2'-O-methylguanosine-3'-phosphate
  modified_base 8: mod_base = OTHER; note = 2'-fluorocytidine-3'-phosphate
  modified_base 9: mod_base = OTHER; note = 2'-O-methyladenosine-3'-phosphate
  modified_base 10: mod_base = OTHER; note = 2'-fluoroadenosine-3'-phosphate
  modified_base 11: mod_base = OTHER; note = 2'-O-methyladenosine-3'-phosphate
  modified_base 12: mod_base = OTHER; note = 2'-O-methyladenosine-3'-phosphate
  modified_base 13: mod_base = OTHER; note = 2'-O-methylcytidine-3'-phosphate
  modified_base 14: mod_base = OTHER; note = 2'-fluoroadenosine-3'-phosphate
  modified_base 15: mod_base = OTHER; note = 2'-O-methylguanosine-3'-phosphate
  modified_base 16: mod_base = OTHER; note = 2'-fluoroguanosine-3'-phosphate
  modified_base 17: mod_base = OTHER; note = 2'-O-methyluridine-3'-phosphate
  modified_base 18: mod_base = OTHER; note = 2'-fluorocytidine-3'-phosphate
  modified_base 19: mod_base = OTHER; note = 2'-O-methyluridine-3'-phosphate
  modified_base 20: mod_base = OTHER; note = 2'-fluoroadenosine-3'-phosphate
  modified_base 21: mod_base = OTHER; note = 2'-O-(N-methylacetamide)guanosine-3'-phosphate
  modified_base 22: mod_base = OTHER; note = 2'-O-(N-methylacetamide)adenosine-3'-phosphate
  modified_base 23: mod_base = OTHER; note = 2'-O-methyladenosine-3'-phosphate
acaaaagcaaaacaggtctagaa

SEQ ID NO: 341 - RNA, 21 nt, synthetic construct
  source 1..21: mol_type = other RNA; note = Description of Artificial Sequence: Synthetic oligonucleotide
  modified_base 1: mod_base = OTHER; note = 2'-fluorocytidine-3'-phosphorothioate
  modified_base 2: mod_base = OTHER; note = 2'-O-methyluridine-3'-phosphorothioate
  modified_base 3: mod_base = OTHER; note = 2'-fluoroadenosine-3'-phosphate
  modified_base 4: mod_base = OTHER; note = 2'-O-methylguanosine-3'-phosphate
  modified_base 5: mod_base = OTHER; note = 2'-fluoroadenosine-3'-phosphate
  modified_base 6: mod_base = OTHER; note = 2'-O-methylcytidine-3'-phosphate
  modified_base 7: mod_base = OTHER; note = 2'-fluorocytidine-3'-phosphate
  modified_base 8: mod_base = OTHER; note = 2'-O-methyluridine-3'-phosphate
  modified_base 9: mod_base = OTHER; note = 2'-fluoroguanosine-3'-phosphate
  modified_base 10: mod_base = OTHER; note = 2'-fluorouridine-3'-phosphate
  modified_base 11: mod_base = OTHER; note = 2'-fluorouridine-3'-phosphate
  modified_base 12: mod_base = OTHER; note = 2'-O-methyluridine-3'-phosphate
  modified_base 13: mod_base = OTHER; note = 2'-fluorouridine-3'-phosphate
  modified_base 14: mod_base = OTHER; note = 2'-O-methylguanosine-3'-phosphate
  modified_base 15: mod_base = OTHER; note = 2'-fluorocytidine-3'-phosphate
  modified_base 16: mod_base = OTHER; note = 2'-O-methyluridine-3'-phosphate
  modified_base 17: mod_base = OTHER; note = 2'-fluorouridine-3'-phosphate
  modified_base 18: mod_base = OTHER; note = 2'-O-methyluridine-3'-phosphate
  modified_base 19: mod_base = OTHER; note = 2'-fluorouridine-3'-phosphate
  modified_base 20: mod_base = OTHER; note = 2'-O-methylguanosine-3'-phosphate
  modified_base 21: mod_base = OTHER; note = 2'-fluorouridine-3'-phosphate N-[tris(GalNAc-alkyl)-amidodecanoyl)]-4-hydroxyprolinol Hyp-(GalNAc-alkyl)3
ctagacctgttttgcttttgt

SEQ ID NO: 342 - RNA, 23 nt, synthetic construct
  source 1..23: mol_type = other RNA; note = Description of Artificial Sequence: Synthetic oligonucleotide
  modified_base 1: mod_base = OTHER; note = 2'-O-methyladenosine-3'-phosphorothioate
  modified_base 2: mod_base = OTHER; note = 2'-fluorocytidine-3'-phosphorothioate
  modified_base 3: mod_base = OTHER; note = 2'-O-methyladenosine-3'-phosphate
  modified_base 4: mod_base = OTHER; note = 2'-fluoroadenosine-3'-phosphate
  modified_base 5: mod_base = OTHER; note = 2'-O-methyladenosine-3'-phosphate
  modified_base 6: mod_base = OTHER; note = 2'-fluoroadenosine-3'-phosphate
  modified_base 7: mod_base = OTHER; note = 2'-O-methylguanosine-3'-phosphate
  modified_base 8: mod_base = OTHER; note = 2'-fluorocytidine-3'-phosphate
  modified_base 9: mod_base = OTHER; note = 2'-O-methyladenosine-3'-phosphate
  modified_base 10: mod_base = OTHER; note = 2'-fluoroadenosine-3'-phosphate
  modified_base 11: mod_base = OTHER; note = 2'-O-methyladenosine-3'-phosphate
  modified_base 12: mod_base = OTHER; note = 2'-O-methyladenosine-3'-phosphate
  modified_base 13: mod_base = OTHER; note = 2'-O-methylcytidine-3'-phosphate
  modified_base 14: mod_base = OTHER; note = 2'-fluoroadenosine-3'-phosphate
  modified_base 15: mod_base = OTHER; note = 2'-O-methylguanosine-3'-phosphate
  modified_base 16: mod_base = OTHER; note = 2'-fluoroguanosine-3'-phosphate
  modified_base 17: mod_base = OTHER; note = 2'-O-methyluridine-3'-phosphate
  modified_base 18: mod_base = OTHER; note = 2'-fluorocytidine-3'-phosphate
  modified_base 19: mod_base = OTHER; note = 2'-O-methyluridine-3'-phosphate
  modified_base 20: mod_base = OTHER; note = 2'-fluoroadenosine-3'-phosphate
  modified_base 21: mod_base = OTHER; note = 2'-O-methylguanosine-3'-phosphorothioate
  modified_base 22: mod_base = OTHER; note = 2'-O-(N-methylacetamide)adenosine-3'-phosphorothioate
  modified_base 23: mod_base = OTHER; note = 2'-O-methyladenosine-3'-phosphate
acaaaagcaaaacaggtctagaa

SEQ ID NO: 343 - RNA, 21 nt, synthetic construct
  source 1..21: mol_type = other RNA; note = Description of Artificial Sequence: Synthetic oligonucleotide
  modified_base 1: mod_base = OTHER; note = 2'-fluorocytidine-3'-phosphorothioate
  modified_base 2: mod_base = OTHER; note = 2'-O-methyluridine-3'-phosphorothioate
  modified_base 3: mod_base = OTHER; note = 2'-fluoroadenosine-3'-phosphate
  modified_base 4: mod_base = OTHER; note = 2'-O-methylguanosine-3'-phosphate
  modified_base 5: mod_base = OTHER; note = 2'-fluoroadenosine-3'-phosphate
  modified_base 6: mod_base = OTHER; note = 2'-O-methylcytidine-3'-phosphate
  modified_base 7: mod_base = OTHER; note = 2'-fluorocytidine-3'-phosphate
  modified_base 8: mod_base = OTHER; note = 2'-O-methyluridine-3'-phosphate
  modified_base 9: mod_base = OTHER; note = 2'-fluoroguanosine-3'-phosphate
  modified_base 10: mod_base = OTHER; note = 2'-fluorouridine-3'-phosphate
  modified_base 11: mod_base = OTHER; note = 2'-fluorouridine-3'-phosphate
  modified_base 12: mod_base = OTHER; note = 2'-O-methyluridine-3'-phosphate
  modified_base 13: mod_base = OTHER; note = 2'-fluorouridine-3'-phosphate
  modified_base 14: mod_base = OTHER; note = 2'-O-methylguanosine-3'-phosphate
  modified_base 15: mod_base = OTHER; note = 2'-fluorocytidine-3'-phosphate
  modified_base 16: mod_base = OTHER; note = 2'-O-methyluridine-3'-phosphate
  modified_base 17: mod_base = OTHER; note = 2'-fluorouridine-3'-phosphate
  modified_base 18: mod_base = OTHER; note = 2'-O-methyluridine-3'-phosphate
  modified_base 19: mod_base = OTHER; note = 2'-fluorouridine-3'-phosphate
  modified_base 20: mod_base = OTHER; note = 2'-O-methylguanosine-3'-phosphate
  modified_base 21: mod_base = OTHER; note = 2'-fluorouridine-3'-phosphate N-[tris(GalNAc-alkyl)-amidodecanoyl)]-4-hydroxyprolinol Hyp-(GalNAc-alkyl)3
ctagacctgttttgcttttgt

SEQ ID NO: 344 - RNA, 23 nt, synthetic construct
  source 1..23: mol_type = other RNA; note = Description of Artificial Sequence: Synthetic oligonucleotide
  modified_base 1: mod_base = OTHER; note = 2'-O-methyladenosine-3'-phosphorothioate
  modified_base 2: mod_base = OTHER; note = 2'-fluorocytidine-3'-phosphorothioate
  modified_base 3: mod_base = OTHER; note = 2'-O-methyladenosine-3'-phosphate
  modified_base 4: mod_base = OTHER; note = 2'-fluoroadenosine-3'-phosphate
  modified_base 5: mod_base = OTHER; note = 2'-O-methyladenosine-3'-phosphate
  modified_base 6: mod_base = OTHER; note = 2'-fluoroadenosine-3'-phosphate
  modified_base 7: mod_base = OTHER; note = 2'-O-methylguanosine-3'-phosphate
  modified_base 8: mod_base = OTHER; note = 2'-fluorocytidine-3'-phosphate
  modified_base 9: mod_base = OTHER; note = 2'-O-methyladenosine-3'-phosphate
  modified_base 10: mod_base = OTHER; note = 2'-fluoroadenosine-3'-phosphate
  modified_base 11: mod_base = OTHER; note = 2'-O-methyladenosine-3'-phosphate
  modified_base 12: mod_base = OTHER; note = 2'-O-methyladenosine-3'-phosphate
  modified_base 13: mod_base = OTHER; note = 2'-O-methylcytidine-3'-phosphate
  modified_base 14: mod_base = OTHER; note = 2'-fluoroadenosine-3'-phosphate
  modified_base 15: mod_base = OTHER; note = 2'-O-methylguanosine-3'-phosphate
  modified_base 16: mod_base = OTHER; note = 2'-fluoroguanosine-3'-phosphate
  modified_base 17: mod_base = OTHER; note = 2'-O-methyluridine-3'-phosphate
  modified_base 18: mod_base = OTHER; note = 2'-fluorocytidine-3'-phosphate
  modified_base 19: mod_base = OTHER; note = 2'-O-methyluridine-3'-phosphate
  modified_base 20: mod_base = OTHER; note = 2'-fluoroadenosine-3'-phosphate
  modified_base 21: mod_base = OTHER; note = 2'-O-(N-methylacetamide)guanosine-3'-phosphorothioate
  modified_base 22: mod_base = OTHER; note = 2'-O-(N-methylacetamide)adenosine-3'-phosphorothioate
  modified_base 23: mod_base = OTHER; note = 2'-O-methyladenosine-3'-phosphate
acaaaagcaaaacaggtctagaa

SEQ ID NO: 345 - RNA, 21 nt, synthetic construct
  source 1..21: mol_type = other RNA; note = Description of Artificial Sequence: Synthetic oligonucleotide
  modified_base 1: mod_base = OTHER; note = 2'-fluorocytidine-3'-phosphorothioate
  modified_base 2: mod_base = OTHER; note = 2'-O-methyluridine-3'-phosphorothioate
  modified_base 3: mod_base = OTHER; note = 2'-fluoroadenosine-3'-phosphate
  modified_base 4: mod_base = OTHER; note = 2'-O-methylguanosine-3'-phosphate
  modified_base 5: mod_base = OTHER; note = 2'-fluoroadenosine-3'-phosphate
  modified_base 6: mod_base = OTHER; note = 2'-O-methylcytidine-3'-phosphate
  modified_base 7: mod_base = OTHER; note = 2'-fluorocytidine-3'-phosphate
  modified_base 8: mod_base = OTHER; note = 2'-O-methyluridine-3'-phosphate
  modified_base 9: mod_base = OTHER; note = 2'-fluoroguanosine-3'-phosphate
  modified_base 10: mod_base = OTHER; note = 2'-fluorouridine-3'-phosphate
  modified_base 11: mod_base = OTHER; note = 2'-fluorouridine-3'-phosphate
  modified_base 12: mod_base = OTHER; note = 2'-O-methyluridine-3'-phosphate
  modified_base 13: mod_base = OTHER; note = 2'-fluorouridine-3'-phosphate
  modified_base 14: mod_base = OTHER; note = 2'-O-methylguanosine-3'-phosphate
  modified_base 15: mod_base = OTHER; note = 2'-fluorocytidine-3'-phosphate
  modified_base 16: mod_base = OTHER; note = 2'-O-methyluridine-3'-phosphate
  modified_base 17: mod_base = OTHER; note = 2'-fluorouridine-3'-phosphate
  modified_base 18: mod_base = OTHER; note = 2'-O-methyluridine-3'-phosphate
  modified_base 19: mod_base = OTHER; note = 2'-fluorouridine-3'-phosphate
  modified_base 20: mod_base = OTHER; note = 2'-O-methylguanosine-3'-phosphate
  modified_base 21: mod_base = OTHER; note = 2'-fluorouridine-3'-phosphate N-[tris(GalNAc-alkyl)-amidodecanoyl)]-4-hydroxyprolinol Hyp-(GalNAc-alkyl)3
ctagacctgttttgcttttgt

SEQ ID NO: 346 - RNA, 23 nt, synthetic construct
  source 1..23: mol_type = other RNA; note = Description of Artificial Sequence: Synthetic oligonucleotide
  modified_base 1: mod_base = OTHER; note = 3'-O-methyladenosine-2'-phosphate
  modified_base 2: mod_base = OTHER; note = 2'-fluorocytidine-3'-phosphorothioate
  modified_base 3: mod_base = OTHER; note = 2'-O-methyladenosine-3'-phosphate
  modified_base 4: mod_base = OTHER; note = 2'-fluoroadenosine-3'-phosphate
  modified_base 5: mod_base = OTHER; note = 2'-O-methyladenosine-3'-phosphate
  modified_base 6: mod_base = OTHER; note = 2'-fluoroadenosine-3'-phosphate
  modified_base 7: mod_base = OTHER; note = 2'-O-methylguanosine-3'-phosphate
  modified_base 8: mod_base = OTHER; note = 2'-fluorocytidine-3'-phosphate
  modified_base 9: mod_base = OTHER; note = 2'-O-methyladenosine-3'-phosphate
  modified_base 10: mod_base = OTHER; note = 2'-fluoroadenosine-3'-phosphate
  modified_base 11: mod_base = OTHER; note = 2'-O-methyladenosine-3'-phosphate
  modified_base 12: mod_base = OTHER; note = 2'-O-methyladenosine-3'-phosphate
  modified_base 13: mod_base = OTHER; note = 2'-O-methylcytidine-3'-phosphate
  modified_base 14: mod_base = OTHER; note = 2'-fluoroadenosine-3'-phosphate
  modified_base 15: mod_base = OTHER; note = 2'-O-methylguanosine-3'-phosphate
  modified_base 16: mod_base = OTHER; note = 2'-fluoroguanosine-3'-phosphate
  modified_base 17: mod_base = OTHER; note = 2'-O-methyluridine-3'-phosphate
  modified_base 18: mod_base = OTHER; note = 2'-fluorocytidine-3'-phosphate
  modified_base 19: mod_base = OTHER; note = 2'-O-methyluridine-3'-phosphate
  modified_base 20: mod_base = OTHER; note = 2'-fluoroadenosine-3'-phosphate
  modified_base 21: mod_base = OTHER; note = 2'-O-methylguanosine-3'-phosphorothioate
  modified_base 22: mod_base = OTHER; note = 2'-O-methyladenosine-3'-phosphorothioate
  modified_base 23: mod_base = OTHER; note = 2'-O-methyladenosine-3'-phosphate
acaaaagcaaaacaggtctagaa

SEQ ID NO: 347 - RNA, 21 nt, synthetic construct
  source 1..21: mol_type = other RNA; note = Description of Artificial Sequence: Synthetic oligonucleotide
  modified_base 1: mod_base = OTHER; note = 2'-fluorocytidine-3'-phosphorothioate
  modified_base 2: mod_base = OTHER; note = 2'-O-methyluridine-3'-phosphorothioate
  modified_base 3: mod_base = OTHER; note = 2'-fluoroadenosine-3'-phosphate
  modified_base 4: mod_base = OTHER; note = 2'-O-methylguanosine-3'-phosphate
  modified_base 5: mod_base = OTHER; note = 2'-fluoroadenosine-3'-phosphate
  modified_base 6: mod_base = OTHER; note = 2'-O-methylcytidine-3'-phosphate
  modified_base 7: mod_base = OTHER; note = 2'-fluorocytidine-3'-phosphate
  modified_base 8: mod_base = OTHER; note = 2'-O-methyluridine-3'-phosphate
  modified_base 9: mod_base = OTHER; note = 2'-fluoroguanosine-3'-phosphate
  modified_base 10: mod_base = OTHER; note = 2'-fluorouridine-3'-phosphate
  modified_base 11: mod_base = OTHER; note = 2'-fluorouridine-3'-phosphate
  modified_base 12: mod_base = OTHER; note = 2'-O-methyluridine-3'-phosphate
  modified_base 13: mod_base = OTHER; note = 2'-fluorouridine-3'-phosphate
  modified_base 14: mod_base = OTHER; note = 2'-O-methylguanosine-3'-phosphate
  modified_base 15: mod_base = OTHER; note = 2'-fluorocytidine-3'-phosphate
  modified_base 16: mod_base = OTHER; note = 2'-O-methyluridine-3'-phosphate
  modified_base 17: mod_base = OTHER; note = 2'-fluorouridine-3'-phosphate
  modified_base 18: mod_base = OTHER; note = 2'-O-methyluridine-3'-phosphate
  modified_base 19: mod_base = OTHER; note = 2'-fluorouridine-3'-phosphate
  modified_base 20: mod_base = OTHER; note = 2'-O-methylguanosine-3'-phosphate
  modified_base 21: mod_base = OTHER; note = 2'-fluorouridine-3'-phosphate N-[tris(GalNAc-alkyl)-amidodecanoyl)]-4-hydroxyprolinol Hyp-(GalNAc-alkyl)3
ctagacctgttttgcttttgt

SEQ ID NO: 348 - RNA, 23 nt, synthetic construct
  source 1..23: mol_type = other RNA; note = Description of Artificial Sequence: Synthetic oligonucleotide
  modified_base 1: mod_base = OTHER; note = 2'-O-methyladenosine-3'-phosphorothioate
  modified_base 2: mod_base = OTHER; note = 3'-O-methylcytidine-2'-phosphate
  modified_base 3: mod_base = OTHER; note = 2'-O-methyladenosine-3'-phosphate
  modified_base 4: mod_base = OTHER; note = 2'-fluoroadenosine-3'-phosphate
  modified_base 5: mod_base = OTHER; note = 2'-O-methyladenosine-3'-phosphate
  modified_base 6: mod_base = OTHER; note = 2'-fluoroadenosine-3'-phosphate
  modified_base 7: mod_base = OTHER; note = 2'-O-methylguanosine-3'-phosphate
  modified_base 8: mod_base = OTHER; note = 2'-fluorocytidine-3'-phosphate
  modified_base 9: mod_base = OTHER; note = 2'-O-methyladenosine-3'-phosphate
  modified_base 10: mod_base = OTHER; note = 2'-fluoroadenosine-3'-phosphate
  modified_base 11: mod_base = OTHER; note = 2'-O-methyladenosine-3'-phosphate
  modified_base 12: mod_base = OTHER; note = 2'-O-methyladenosine-3'-phosphate
  modified_base 13: mod_base = OTHER; note = 2'-O-methylcytidine-3'-phosphate
  modified_base 14: mod_base = OTHER; note = 2'-fluoroadenosine-3'-phosphate
  modified_base 15: mod_base = OTHER; note = 2'-O-methylguanosine-3'-phosphate
  modified_base 16: mod_base = OTHER; note = 2'-fluoroguanosine-3'-phosphate
  modified_base 17: mod_base = OTHER; note = 2'-O-methyluridine-3'-phosphate
  modified_base 18: mod_base = OTHER; note = 2'-fluorocytidine-3'-phosphate
  modified_base 19: mod_base = OTHER; note = 2'-O-methyluridine-3'-phosphate
  modified_base 20: mod_base = OTHER; note = 2'-fluoroadenosine-3'-phosphate
  modified_base 21: mod_base = OTHER; note = 2'-O-methylguanosine-3'-phosphorothioate
  modified_base 22: mod_base = OTHER; note = 2'-O-methyladenosine-3'-phosphorothioate
  modified_base 23: mod_base = OTHER; note = 2'-O-methyladenosine-3'-phosphate
acaaaagcaaaacaggtctagaa

SEQ ID NO: 349 - RNA, 21 nt, synthetic construct
  source 1..21: mol_type = other RNA; note = Description of Artificial Sequence: Synthetic oligonucleotide
  modified_base 1: mod_base = OTHER; note = 2'-fluorocytidine-3'-phosphorothioate
  modified_base 2: mod_base = OTHER; note = 2'-O-methyluridine-3'-phosphorothioate
  modified_base 3: mod_base = OTHER; note = 2'-fluoroadenosine-3'-phosphate
  modified_base 4: mod_base = OTHER; note = 2'-O-methylguanosine-3'-phosphate
  modified_base 5: mod_base = OTHER; note = 2'-fluoroadenosine-3'-phosphate
  modified_base 6: mod_base = OTHER; note = 2'-O-methylcytidine-3'-phosphate
  modified_base 7: mod_base = OTHER; note = 2'-fluorocytidine-3'-phosphate
  modified_base 8: mod_base = OTHER; note = 2'-O-methyluridine-3'-phosphate
  modified_base 9: mod_base = OTHER; note = 2'-fluoroguanosine-3'-phosphate
  modified_base 10: mod_base = OTHER; note = 2'-fluorouridine-3'-phosphate
  modified_base 11: mod_base = OTHER; note = 2'-fluorouridine-3'-phosphate
  modified_base 12: mod_base = OTHER; note = 2'-O-methyluridine-3'-phosphate
  modified_base 13: mod_base = OTHER; note = 2'-fluorouridine-3'-phosphate
  modified_base 14: mod_base = OTHER; note = 2'-O-methylguanosine-3'-phosphate
  modified_base 15: mod_base = OTHER; note = 2'-fluorocytidine-3'-phosphate
  modified_base 16: mod_base = OTHER; note = 2'-O-methyluridine-3'-phosphate
  modified_base 17: mod_base = OTHER; note = 2'-fluorouridine-3'-phosphate
  modified_base 18: mod_base = OTHER; note = 2'-O-methyluridine-3'-phosphate
  modified_base 19: mod_base = OTHER; note = 2'-fluorouridine-3'-phosphate
  modified_base 20: mod_base = OTHER; note = 2'-O-methylguanosine-3'-phosphate
  modified_base 21: mod_base = OTHER; note = 2'-fluorouridine-3'-phosphate N-[tris(GalNAc-alkyl)-amidodecanoyl)]-4-hydroxyprolinol Hyp-(GalNAc-alkyl)3
ctagacctgttttgcttttgt

SEQ ID NO: 350 - RNA, 23 nt, synthetic construct
  source 1..23: mol_type = other RNA; note = Description of Artificial Sequence: Synthetic oligonucleotide
  modified_base 1: mod_base = OTHER; note = 2'-O-(N-methylacetamide)adenosine-3'-phosphate
  modified_base 2: mod_base = OTHER; note = 2'-fluorocytidine-3'-phosphorothioate
  modified_base 3: mod_base = OTHER; note = 2'-O-methyladenosine-3'-phosphate
  modified_base 4: mod_base = OTHER; note = 2'-fluoroadenosine-3'-phosphate
  modified_base 5: mod_base = OTHER; note = 2'-O-methyladenosine-3'-phosphate
  modified_base 6: mod_base = OTHER; note = 2'-fluoroadenosine-3'-phosphate
  modified_base 7: mod_base = OTHER; note = 2'-O-methylguanosine-3'-phosphate
  modified_base 8: mod_base = OTHER; note = 2'-fluorocytidine-3'-phosphate
  modified_base 9: mod_base = OTHER; note = 2'-O-methyladenosine-3'-phosphate
  modified_base 10: mod_base = OTHER; note = 2'-fluoroadenosine-3'-phosphate
  modified_base 11: mod_base = OTHER; note = 2'-O-methyladenosine-3'-phosphate
  modified_base 12: mod_base = OTHER; note = 2'-O-methyladenosine-3'-phosphate
  modified_base 13: mod_base = OTHER; note = 2'-O-methylcytidine-3'-phosphate
  modified_base 14: mod_base = OTHER; note = 2'-fluoroadenosine-3'-phosphate
  modified_base 15: mod_base = OTHER; note = 2'-O-methylguanosine-3'-phosphate
  modified_base 16: mod_base = OTHER; note = 2'-fluoroguanosine-3'-phosphate
  modified_base 17: mod_base = OTHER; note = 2'-O-methyluridine-3'-phosphate
  modified_base 18: mod_base = OTHER; note = 2'-fluorocytidine-3'-phosphate
  modified_base 19: mod_base = OTHER; note = 2'-O-methyluridine-3'-phosphate
  modified_base 20: mod_base = OTHER; note = 2'-fluoroadenosine-3'-phosphate
  modified_base 21: mod_base = OTHER; note = 2'-O-methylguanosine-3'-phosphorothioate
  modified_base 22: mod_base = OTHER; note = 2'-O-methyladenosine-3'-phosphorothioate
  modified_base 23: mod_base = OTHER; note = 2'-O-methyladenosine-3'-phosphate
acaaaagcaaaacaggtctagaa

SEQ ID NO: 351 - RNA, 21 nt, synthetic construct
  source 1..21: mol_type = other RNA; note = Description of Artificial Sequence: Synthetic oligonucleotide
  modified_base 1: mod_base = OTHER; note = 2'-fluorocytidine-3'-phosphorothioate
  modified_base 2: mod_base = OTHER; note = 2'-O-methyluridine-3'-phosphorothioate
  modified_base 3: mod_base = OTHER; note = 2'-fluoroadenosine-3'-phosphate
  modified_base 4: mod_base = OTHER; note = 2'-O-methylguanosine-3'-phosphate
  modified_base 5: mod_base = OTHER; note = 2'-fluoroadenosine-3'-phosphate
  modified_base 6: mod_base = OTHER; note = 2'-O-methylcytidine-3'-phosphate
  modified_base 7: mod_base = OTHER; note = 2'-fluorocytidine-3'-phosphate
  modified_base 8: mod_base = OTHER; note = 2'-O-methyluridine-3'-phosphate
  modified_base 9: mod_base = OTHER; note = 2'-fluoroguanosine-3'-phosphate
  modified_base 10: mod_base = OTHER; note = 2'-fluorouridine-3'-phosphate
  modified_base 11: mod_base = OTHER; note = 2'-fluorouridine-3'-phosphate
  modified_base 12: mod_base = OTHER; note = 2'-O-methyluridine-3'-phosphate
  modified_base 13: mod_base = OTHER; note = 2'-fluorouridine-3'-phosphate
  modified_base 14: mod_base = OTHER; note = 2'-O-methylguanosine-3'-phosphate
  modified_base 15: mod_base = OTHER; note = 2'-fluorocytidine-3'-phosphate
  modified_base 16: mod_base = OTHER; note = 2'-O-methyluridine-3'-phosphate
  modified_base 17: mod_base = OTHER; note = 2'-fluorouridine-3'-phosphate
  modified_base 18: mod_base = OTHER; note = 2'-O-methyluridine-3'-phosphate
  modified_base 19: mod_base = OTHER; note = 2'-fluorouridine-3'-phosphate
  modified_base 20: mod_base = OTHER; note = 2'-O-methylguanosine-3'-phosphate
  modified_base 21: mod_base = OTHER; note = 2'-fluorouridine-3'-phosphate N-[tris(GalNAc-alkyl)-amidodecanoyl)]-4-hydroxyprolinol Hyp-(GalNAc-alkyl)3
ctagacctgttttgcttttgt

SEQ ID NO: 352 - RNA, 23 nt, synthetic construct
  source 1..23: mol_type = other RNA; note = Description of Artificial Sequence: Synthetic oligonucleotide
  modified_base 1: mod_base = OTHER; note = 2'-O-methyladenosine-3'-phosphorothioate
  modified_base 2: mod_base = OTHER; note 2'-O-(N-methylacetamide)-5-methylcytidine-3'-phosphate
  modified_base 3: mod_base = OTHER; note = 2'-O-methyladenosine-3'-phosphate
  modified_base 4: mod_base = OTHER; note = 2'-fluoroadenosine-3'-phosphate
  modified_base 5: mod_base = OTHER; note = 2'-O-methyladenosine-3'-phosphate
  modified_base 6: mod_base = OTHER; note = 2'-fluoroadenosine-3'-phosphate
  modified_base 7: mod_base = OTHER; note = 2'-O-methylguanosine-3'-phosphate
  modified_base 8: mod_base = OTHER; note = 2'-fluorocytidine-3'-phosphate
  modified_base 9: mod_base = OTHER; note = 2'-O-methyladenosine-3'-phosphate
  modified_base 10: mod_base = OTHER; note = 2'-fluoroadenosine-3'-phosphate
  modified_base 11: mod_base = OTHER; note = 2'-O-methyladenosine-3'-phosphate
  modified_base 12: mod_base = OTHER; note = 2'-O-methyladenosine-3'-phosphate
  modified_base 13: mod_base = OTHER; note = 2'-O-methylcytidine-3'-phosphate
  modified_base 14: mod_base = OTHER; note = 2'-fluoroadenosine-3'-phosphate
  modified_base 15: mod_base = OTHER; note = 2'-O-methylguanosine-3'-phosphate
  modified_base 16: mod_base = OTHER; note = 2'-fluoroguanosine-3'-phosphate
  modified_base 17: mod_base = OTHER; note = 2'-O-methyluridine-3'-phosphate
  modified_base 18: mod_base = OTHER; note = 2'-fluorocytidine-3'-phosphate
  modified_base 19: mod_base = OTHER; note = 2'-O-methyluridine-3'-phosphate
  modified_base 20: mod_base = OTHER; note = 2'-fluoroadenosine-3'-phosphate
  modified_base 21: mod_base = OTHER; note = 2'-O-methylguanosine-3'-phosphorothioate
  modified_base 22: mod_base = OTHER; note = 2'-O-methyladenosine-3'-phosphorothioate
  modified_base 23: mod_base = OTHER; note = 2'-O-methyladenosine-3'-phosphate
acaaaagcaaaacaggtctagaa

SEQ ID NO: 353 - RNA, 20 nt, synthetic construct
  source 1..20: mol_type = other RNA; note = Description of Artificial Sequence: Synthetic oligonucleotide
  modified_base 1: mod_base = OTHER; note = 2'-O-methyluridine-3'-phosphorothioate
  modified_base 2: mod_base = OTHER; note = 2'-fluoroadenosine-3'-phosphorothioate
  modified_base 3: mod_base = OTHER; note = 2'-O-methylguanosine-3'-phosphate
  modified_base 4: mod_base = OTHER; note = 2'-fluoroadenosine-3'-phosphate
  modified_base 5: mod_base = OTHER; note = 2'-O-methylcytidine-3'-phosphate
  modified_base 6: mod_base = OTHER; note = 2'-fluorocytidine-3'-phosphate
  modified_base 7: mod_base = OTHER; note = 2'-O-methyluridine-3'-phosphate
  modified_base 8: mod_base = OTHER; note = 2'-fluoroguanosine-3'-phosphate
  modified_base 9: mod_base = OTHER; note = 2'-fluorouridine-3'-phosphate
  modified_base 10: mod_base = OTHER; note = 2'-fluorouridine-3'-phosphate
  modified_base 11: mod_base = OTHER; note = 2'-O-methyluridine-3'-phosphate
  modified_base 12: mod_base = OTHER; note = 2'-fluorouridine-3'-phosphate
  modified_base 13: mod_base = OTHER; note = 2'-O-methylguanosine-3'-phosphate
  modified_base 14: mod_base = OTHER; note = 2'-fluorocytidine-3'-phosphate
  modified_base 15: mod_base = OTHER; note = 2'-O-methyluridine-3'-phosphate
  modified_base 16: mod_base = OTHER; note = 2'-fluorouridine-3'-phosphate
  modified_base 17: mod_base = OTHER; note = 2'-O-methyluridine-3'-phosphate
  modified_base 18: mod_base = OTHER; note = 2'-fluorouridine-3'-phosphate
  modified_base 19: mod_base = OTHER; note = 2'-O-methylguanosine-3'-phosphate
  modified_base 20: mod_base = OTHER; note = 2'-fluorouridine-3'-phosphate N-[tris(GalNAc-alkyl)-amidodecanoyl)]-4-hydroxyprolinol Hyp-(GalNAc-alkyl)3
tagacctgttttgcttttgt

SEQ ID NO: 354 - RNA, 23 nt, synthetic construct
  source 1..23: mol_type = other RNA; note = Description of Artificial Sequence: Synthetic oligonucleotide
  modified_base 1: mod_base = OTHER; note = 2'-O-methyladenosine-3'-phosphorothioate
  modified_base 2: mod_base = OTHER; note = 2'-fluorocytidine-3'-phosphorothioate
  modified_base 3: mod_base = OTHER; note = 2'-O-methyladenosine-3'-phosphate
  modified_base 4: mod_base = OTHER; note = 2'-fluoroadenosine-3'-phosphate
  modified_base 5: mod_base = OTHER; note = 2'-O-methyladenosine-3'-phosphate
  modified_base 6: mod_base = OTHER; note = 2'-fluoroadenosine-3'-phosphate
  modified_base 7: mod_base = OTHER; note = 2'-O-methylguanosine-3'-phosphate
  modified_base 8: mod_base = OTHER; note = 2'-fluorocytidine-3'-phosphate
  modified_base 9: mod_base = OTHER; note = 2'-O-methyladenosine-3'-phosphate
  modified_base 10: mod_base = OTHER; note = 2'-fluoroadenosine-3'-phosphate
  modified_base 11: mod_base = OTHER; note = 2'-O-methyladenosine-3'-phosphate
  modified_base 12: mod_base = OTHER; note = 2'-O-methyladenosine-3'-phosphate
  modified_base 13: mod_base = OTHER; note = 2'-O-methylcytidine-3'-phosphate
  modified_base 14: mod_base = OTHER; note = 2'-fluoroadenosine-3'-phosphate
  modified_base 15: mod_base = OTHER; note = 2'-O-methylguanosine-3'-phosphate
  modified_base 16: mod_base = OTHER; note = 2'-fluoroguanosine-3'-phosphate
  modified_base 17: mod_base = OTHER; note = 2'-O-methyluridine-3'-phosphate
  modified_base 18: mod_base = OTHER; note = 2'-fluorocytidine-3'-phosphate
  modified_base 19: mod_base = OTHER; note = 2'-O-methyluridine-3'-phosphate
  modified_base 20: mod_base = OTHER; note = 2'-fluoroadenosine-3'-phosphate
  modified_base 21: mod_base = OTHER; note = 2'-O-methylguanosine-3'-phosphorothioate
  modified_base 22: mod_base = OTHER; note = 2'-O-methyladenosine-3'-phosphorothioate
  modified_base 23: mod_base = OTHER; note = 2'-O-methyladenosine-3'-phosphate
acaaaagcaaaacaggtctagaa

SEQ ID NO: 355 - RNA, 19 nt, synthetic construct
  source 1..19: mol_type = other RNA; note = Description of Artificial Sequence: Synthetic oligonucleotide
  modified_base 1: mod_base = OTHER; note = 2'-fluoroadenosine-3'-phosphorothioate
  modified_base 2: mod_base = OTHER; note = 2'-O-methylguanosine-3'-phosphorothioate
  modified_base 3: mod_base = OTHER; note = 2'-fluoroadenosine-3'-phosphate
  modified_base 4: mod_base = OTHER; note = 2'-O-methylcytidine-3'-phosphate
  modified_base 5: mod_base = OTHER; note = 2'-fluorocytidine-3'-phosphate
  modified_base 6: mod_base = OTHER; note = 2'-O-methyluridine-3'-phosphate
  modified_base 7: mod_base = OTHER; note = 2'-fluoroguanosine-3'-phosphate
  modified_base 8: mod_base = OTHER; note = 2'-fluorouridine-3'-phosphate
  modified_base 9: mod_base = OTHER; note = 2'-fluorouridine-3'-phosphate
  modified_base 10: mod_base = OTHER; note = 2'-O-methyluridine-3'-phosphate
  modified_base 11: mod_base = OTHER; note = 2'-fluorouridine-3'-phosphate
  modified_base 12: mod_base = OTHER; note = 2'-O-methylguanosine-3'-phosphate
  modified_base 13: mod_base = OTHER; note = 2'-fluorocytidine-3'-phosphate
  modified_base 14: mod_base = OTHER; note = 2'-O-methyluridine-3'-phosphate
  modified_base 15: mod_base = OTHER; note = 2'-fluorouridine-3'-phosphate
  modified_base 16: mod_base = OTHER; note = 2'-O-methyluridine-3'-phosphate
  modified_base 17: mod_base = OTHER; note = 2'-fluorouridine-3'-phosphate
  modified_base 18: mod_base = OTHER; note = 2'-O-methylguanosine-3'-phosphate
  modified_base 19: mod_base = OTHER; note = 2'-fluorouridine-3'-phosphate N-[tris(GalNAc-alkyl)-amidodecanoyl)]-4-hydroxyprolinol Hyp-(GalNAc-alkyl)3
agacctgttttgcttttgt

SEQ ID NO: 356 - RNA, 23 nt, synthetic construct
  source 1..23: mol_type = other RNA; note = Description of Artificial Sequence: Synthetic oligonucleotide
  modified_base 1: mod_base = OTHER; note = 2'-O-methyladenosine-3'-phosphorothioate
  modified_base 2: mod_base = OTHER; note = 2'-fluorocytidine-3'-phosphorothioate
  modified_base 3: mod_base = OTHER; note = 2'-O-methyladenosine-3'-phosphate
  modified_base 4: mod_base = OTHER; note = 2'-fluoroadenosine-3'-phosphate
  modified_base 5: mod_base = OTHER; note = 2'-O-methyladenosine-3'-phosphate
  modified_base 6: mod_base = OTHER; note = 2'-fluoroadenosine-3'-phosphate
  modified_base 7: mod_base = OTHER; note = 2'-O-methylguanosine-3'-phosphate
  modified_base 8: mod_base = OTHER; note = 2'-fluorocytidine-3'-phosphate
  modified_base 9: mod_base = OTHER; note = 2'-O-methyladenosine-3'-phosphate
  modified_base 10: mod_base = OTHER; note = 2'-fluoroadenosine-3'-phosphate
  modified_base 11: mod_base = OTHER; note = 2'-O-methyladenosine-3'-phosphate
  modified_base 12: mod_base = OTHER; note = 2'-O-methyladenosine-3'-phosphate
  modified_base 13: mod_base = OTHER; note = 2'-O-methylcytidine-3'-phosphate
  modified_base 14: mod_base = OTHER; note = 2'-fluoroadenosine-3'-phosphate
  modified_base 15: mod_base = OTHER; note = 2'-O-methylguanosine-3'-phosphate
  modified_base 16: mod_base = OTHER; note = 2'-fluoroguanosine-3'-phosphate
  modified_base 17: mod_base = OTHER; note = 2'-O-methyluridine-3'-phosphate
  modified_base 18: mod_base = OTHER; note = 2'-fluorocytidine-3'-phosphate
  modified_base 19: mod_base = OTHER; note = 2'-O-methyluridine-3'-phosphate
  modified_base 20: mod_base = OTHER; note = 2'-fluoroadenosine-3'-phosphate
  modified_base 21: mod_base = OTHER; note = 2'-O-methylguanosine-3'-phosphorothioate
  modified_base 22: mod_base = OTHER; note = 2'-O-methyladenosine-3'-phosphorothioate
  modified_base 23: mod_base = OTHER; note = 2'-O-methyladenosine-3'-phosphate
acaaaagcaaaacaggtctagaa

SEQ ID NO: 357 - RNA, 22 nt, synthetic construct
  source 1..22: mol_type = other RNA; note = Description of Artificial Sequence: Synthetic oligonucleotide
  modified_base 1: mod_base = OTHER; note = 2'-O-methyluridine-3'-phosphorothioate
  modified_base 2: mod_base = OTHER; note = 2'-fluorocytidine-3'-phosphorothioate
  modified_base 3: mod_base = OTHER; note = 2'-O-methyluridine-3'-phosphate
  modified_base 4: mod_base = OTHER; note = 2'-fluoroadenosine-3'-phosphate
  modified_base 5: mod_base = OTHER; note = 2'-O-methylguanosine-3'-phosphate
  modified_base 6: mod_base = OTHER; note = 2'-fluoroadenosine-3'-phosphate
  modified_base 7: mod_base = OTHER; note = 2'-O-methylcytidine-3'-phosphate
  modified_base 8: mod_base = OTHER; note = 2'-fluorocytidine-3'-phosphate
  modified_base 9: mod_base = OTHER; note = 2'-O-methyluridine-3'-phosphate
  modified_base 10: mod_base = OTHER; note = 2'-fluoroguanosine-3'-phosphate
  modified_base 11: mod_base = OTHER; note = 2'-fluorouridine-3'-phosphate
  modified_base 12: mod_base = OTHER; note = 2'-fluorouridine-3'-phosphate
  modified_base 13: mod_base = OTHER; note = 2'-O-methyluridine-3'-phosphate
  modified_base 14: mod_base = OTHER; note = 2'-fluorouridine-3'-phosphate
  modified_base 15: mod_base = OTHER; note = 2'-O-methylguanosine-3'-phosphate
  modified_base 16: mod_base = OTHER; note = 2'-fluorocytidine-3'-phosphate
  modified_base 17: mod_base = OTHER; note = 2'-O-methyluridine-3'-phosphate
  modified_base 18: mod_base = OTHER; note = 2'-fluorouridine-3'-phosphate
  modified_base 19: mod_base = OTHER; note = 2'-O-methyluridine-3'-phosphate
  modified_base 20: mod_base = OTHER; note = 2'-fluorouridine-3'-phosphate
  modified_base 21: mod_base = OTHER; note = 2'-O-methylguanosine-3'-phosphate
  modified_base 22: mod_base = OTHER; note = 2'-fluorouridine-3'-phosphate N-[tris(GalNAc-alkyl)-amidodecanoyl)]-4-hydroxyprolinol Hyp-(GalNAc-alkyl)3
tctagacctgttttgcttttgt

SEQ ID NO: 358 - RNA, 23 nt, synthetic construct
  source 1..23: mol_type = other RNA; note = Description of Artificial Sequence: Synthetic oligonucleotide
  modified_base 1: mod_base = OTHER; note = 2'-O-methyladenosine-3'-phosphorothioate
  modified_base 2: mod_base = OTHER; note = 2'-fluorocytidine-3'-phosphorothioate
  modified_base 3: mod_base = OTHER; note = 2'-O-methyladenosine-3'-phosphate
  modified_base 4: mod_base = OTHER; note = 2'-fluoroadenosine-3'-phosphate
  modified_base 5: mod_base = OTHER; note = 2'-O-methyladenosine-3'-phosphate
  modified_base 6: mod_base = OTHER; note = 2'-fluoroadenosine-3'-phosphate
  modified_base 7: mod_base = OTHER; note = 2'-O-methylguanosine-3'-phosphate
  modified_base 8: mod_base = OTHER; note = 2'-fluorocytidine-3'-phosphate
  modified_base 9: mod_base = OTHER; note = 2'-O-methyladenosine-3'-phosphate
  modified_base 10: mod_base = OTHER; note = 2'-fluoroadenosine-3'-phosphate
  modified_base 11: mod_base = OTHER; note = 2'-O-methyladenosine-3'-phosphate
  modified_base 12: mod_base = OTHER; note = 2'-O-methyladenosine-3'-phosphate
  modified_base 13: mod_base = OTHER; note = 2'-O-methylcytidine-3'-phosphate
  modified_base 14: mod_base = OTHER; note = 2'-fluoroadenosine-3'-phosphate
  modified_base 15: mod_base = OTHER; note = 2'-O-methylguanosine-3'-phosphate
  modified_base 16: mod_base = OTHER; note = 2'-fluoroguanosine-3'-phosphate
  modified_base 17: mod_base = OTHER; note = 2'-O-methyluridine-3'-phosphate
  modified_base 18: mod_base = OTHER; note = 2'-fluorocytidine-3'-phosphate
  modified_base 19: mod_base = OTHER; note = 2'-O-methyluridine-3'-phosphate
  modified_base 20: mod_base = OTHER; note = 2'-fluoroadenosine-3'-phosphate
  modified_base 21: mod_base = OTHER; note = 2'-O-methylguanosine-3'-phosphorothioate
  modified_base 22: mod_base = OTHER; note = 2'-O-methyladenosine-3'-phosphorothioate
  modified_base 23: mod_base = OTHER; note = 2'-O-methyladenosine-3'-phosphate
acaaaagcaaaacaggtctagaa

SEQ ID NO: 359 - RNA, 23 nt, synthetic construct
  source 1..23: mol_type = other RNA; note = Description of Artificial Sequence: Synthetic oligonucleotide
  modified_base 1: mod_base = OTHER; note = 2'-fluorouridine-3'-phosphorothioate
  modified_base 2: mod_base = OTHER; note = 2'-O-methyluridine-3'-phosphorothioate
  modified_base 3: mod_base = OTHER; note = 2'-fluorocytidine-3'-phosphate
  modified_base 4: mod_base = OTHER; note = 2'-O-methyluridine-3'-phosphate
  modified_base 5: mod_base = OTHER; note = 2'-fluoroadenosine-3'-phosphate
  modified_base 6: mod_base = OTHER; note = 2'-O-methylguanosine-3'-phosphate
  modified_base 7: mod_base = OTHER; note = 2'-fluoroadenosine-3'-phosphate
  modified_base 8: mod_base = OTHER; note = 2'-O-methylcytidine-3'-phosphate
  modified_base 9: mod_base = OTHER; note = 2'-fluorocytidine-3'-phosphate
  modified_base 10: mod_base = OTHER; note = 2'-O-methyluridine-3'-phosphate
  modified_base 11: mod_base = OTHER; note = 2'-fluoroguanosine-3'-phosphate
  modified_base 12: mod_base = OTHER; note = 2'-fluorouridine-3'-phosphate
  modified_base 13: mod_base = OTHER; note = 2'-fluorouridine-3'-phosphate
  modified_base 14: mod_base = OTHER; note = 2'-O-methyluridine-3'-phosphate
  modified_base 15: mod_base = OTHER; note = 2'-fluorouridine-3'-phosphate
  modified_base 16: mod_base = OTHER; note = 2'-O-methylguanosine-3'-phosphate
  modified_base 17: mod_base = OTHER; note = 2'-fluorocytidine-3'-phosphate
  modified_base 18: mod_base = OTHER; note = 2'-O-methyluridine-3'-phosphate
  modified_base 19: mod_base = OTHER; note = 2'-fluorouridine-3'-phosphate
  modified_base 20: mod_base = OTHER; note = 2'-O-methyluridine-3'-phosphate
  modified_base 21: mod_base = OTHER; note = 2'-fluorouridine-3'-phosphate
  modified_base 22: mod_base = OTHER; note = 2'-O-methylguanosine-3'-phosphate
  modified_base 23: mod_base = OTHER; note = 2'-fluorouridine-3'-phosphate N-[tris(GalNAc-alkyl)-amidodecanoyl)]-4-hydroxyprolinol Hyp-(GalNAc-alkyl)3
ttctagacctgttttgcttttgt

SEQ ID NO: 360 - RNA, 23 nt, synthetic construct
  source 1..23: mol_type = other RNA; note = Description of Artificial Sequence: Synthetic oligonucleotide
  modified_base 1: mod_base = OTHER; note = 2'-O-methyladenosine-3'-phosphorothioate
  modified_base 2: mod_base = OTHER; note = 2'-fluorocytidine-3'-phosphorothioate
  modified_base 3: mod_base = OTHER; note = 2'-O-methyladenosine-3'-phosphate
  modified_base 4: mod_base = OTHER; note = 2'-fluoroadenosine-3'-phosphate
  modified_base 5: mod_base = OTHER; note = 2'-O-methyladenosine-3'-phosphate
  modified_base 6: mod_base = OTHER; note = 2'-fluoroadenosine-3'-phosphate
  modified_base 7: mod_base = OTHER; note = 2'-O-methylguanosine-3'-phosphate
  modified_base 8: mod_base = OTHER; note = 2'-fluorocytidine-3'-phosphate
  modified_base 9: mod_base = OTHER; note = 2'-O-methyladenosine-3'-phosphate
  modified_base 10: mod_base = OTHER; note = 2'-fluoroadenosine-3'-phosphate
  modified_base 11: mod_base = OTHER; note = 2'-O-methyladenosine-3'-phosphate
  modified_base 12: mod_base = OTHER; note = 2'-O-methyladenosine-3'-phosphate
  modified_base 13: mod_base = OTHER; note = 2'-O-methylcytidine-3'-phosphate
  modified_base 14: mod_base = OTHER; note = 2'-fluoroadenosine-3'-phosphate
  modified_base 15: mod_base = OTHER; note = 2'-O-methylguanosine-3'-phosphate
  modified_base 16: mod_base = OTHER; note = 2'-fluoroguanosine-3'-phosphate
  modified_base 17: mod_base = OTHER; note = 2'-O-methyluridine-3'-phosphate
  modified_base 18: mod_base = OTHER; note = 2'-fluorocytidine-3'-phosphate
  modified_base 19: mod_base = OTHER; note = 2'-O-methyluridine-3'-phosphate
  modified_base 20: mod_base = OTHER; note = 2'-fluoroadenosine-3'-phosphate
  modified_base 21: mod_base = OTHER; note = 2'-O-methylguanosine-3'-phosphorothioate
  modified_base 22: mod_base = OTHER; note = 2'-O-methyladenosine-3'-phosphorothioate
  modified_base 23: mod_base = OTHER; note = 2'-O-methyladenosine-3'-phosphate
acaaaagcaaaacaggtctagaa

SEQ ID NO: 361 - RNA, 21 nt, synthetic construct
  source 1..21: mol_type = other RNA; note = Description of Artificial Sequence: Synthetic oligonucleotide
  modified_base 1: mod_base = OTHER; note = 2'-fluorocytidine-3'-phosphorothioate
  modified_base 2: mod_base = OTHER; note = 2'-O-methyluridine-3'-phosphorothioate
  modified_base 3: mod_base = OTHER; note = 2'-fluoroadenosine-3'-phosphate
  modified_base 4: mod_base = OTHER; note = 2'-O-methylguanosine-3'-phosphate
  modified_base 5: mod_base = OTHER; note = 2'-fluoroadenosine-3'-phosphate
  modified_base 6: mod_base = OTHER; note = 2'-O-methylcytidine-3'-phosphate
  modified_base 7: mod_base = OTHER; note = 2'-fluorocytidine-3'-phosphate
  modified_base 8: mod_base = OTHER; note = 2'-O-methyluridine-3'-phosphate
  modified_base 9: mod_base = OTHER; note = 2'-fluoroguanosine-3'-phosphate
  modified_base 10: mod_base = OTHER; note = 2'-O-methyluridine-3'-phosphate
  modified_base 11: mod_base = OTHER; note = 2'-O-methyluridine-3'-phosphate
  modified_base 12: mod_base = OTHER; note = 2'-O-methyluridine-3'-phosphate
  modified_base 13: mod_base = OTHER; note = 2'-O-methyluridine-3'-phosphate
  modified_base 14: mod_base = OTHER; note = 2'-O-methylguanosine-3'-phosphate
  modified_base 15: mod_base = OTHER; note = 2'-fluorocytidine-3'-phosphate
  modified_base 16: mod_base = OTHER; note = 2'-O-methyluridine-3'-phosphate
  modified_base 17: mod_base = OTHER; note = 2'-O-methyluridine-3'-phosphate
  modified_base 18: mod_base = OTHER; note = 2'-O-methyluridine-3'-phosphate
  modified_base 19: mod_base = OTHER; note = 2'-O-methyluridine-3'-phosphate
  modified_base 20: mod_base = OTHER; note = 2'-O-methylguanosine-3'-phosphate
  modified_base 21: mod_base = OTHER; note = 2'-O-methyluridine-3'-phosphate N-[tris(GalNAc-alkyl)-amidodecanoyl)]-4-hydroxyprolinol Hyp-(GalNAc-alkyl)3
ctagacctgttttgcttttgt

SEQ ID NO: 362 - RNA, 23 nt, synthetic construct
  source 1..23: mol_type = other RNA; note = Description of Artificial Sequence: Synthetic oligonucleotide
  modified_base 1: mod_base = OTHER; note = 2'-O-methyladenosine-3'-phosphorothioate
  modified_base 2: mod_base = OTHER; note = 2'-fluorocytidine-3'-phosphorothioate
  modified_base 3: mod_base = OTHER; note = 2'-O-methyladenosine-3'-phosphate
  modified_base 4: mod_base = OTHER; note = 2'-fluoroadenosine-3'-phosphate
  modified_base 5: mod_base = OTHER; note = 2'-O-methyladenosine-3'-phosphate
  modified_base 6: mod_base = OTHER; note = 2'-fluoroadenosine-3'-phosphorothioate
  modified_base 7: mod_base = OTHER; note = 2'-O-methylguanosine-3'-phosphate
  modified_base 8: mod_base = OTHER; note = 2'-fluorocytidine-3'-phosphate
  modified_base 9: mod_base = OTHER; note = 2'-O-methyladenosine-3'-phosphate
  modified_base 10: mod_base = OTHER; note = 2'-fluoroadenosine-3'-phosphate
  modified_base 11: mod_base = OTHER; note = 2'-O-methyladenosine-3'-phosphate
  modified_base 12: mod_base = OTHER; note = 2'-O-methyladenosine-3'-phosphate
  modified_base 13: mod_base = OTHER; note = 2'-O-methylcytidine-3'-phosphate
  modified_base 14: mod_base = OTHER; note = 2'-fluoroadenosine-3'-phosphate
  modified_base 15: mod_base = OTHER; note = 2'-O-methylguanosine-3'-phosphate
  modified_base 16: mod_base = OTHER; note = 2'-fluoroguanosine-3'-phosphate
  modified_base 17: mod_base = OTHER; note = 2'-O-methyluridine-3'-phosphate
  modified_base 18: mod_base = OTHER; note = 2'-fluorocytidine-3'-phosphate
  modified_base 19: mod_base = OTHER; note = 2'-O-methyluridine-3'-phosphate
  modified_base 20: mod_base = OTHER; note = 2'-fluoroadenosine-3'-phosphate
  modified_base 21: mod_base = OTHER; note = 2'-O-methylguanosine-3'-phosphorothioate
  modified_base 22: mod_base = OTHER; note = 3'-O-methyladenosine-2'-phosphate
  modified_base 23: mod_base = OTHER; note = 2'-O-methyladenosine-3'-phosphate
acaaaagcaaaacaggtctagaa

SEQ ID NO: 363 - RNA, 21 nt, synthetic construct
  source 1..21: mol_type = other RNA; note = Description of Artificial Sequence: Synthetic oligonucleotide
  modified_base 1: mod_base = OTHER; note = 2'-fluorocytidine-3'-phosphorothioate
  modified_base 2: mod_base = OTHER; note = 2'-O-methyluridine-3'-phosphorothioate
  modified_base 3: mod_base = OTHER; note = 2'-fluoroadenosine-3'-phosphate
  modified_base 4: mod_base = OTHER; note = 2'-O-methylguanosine-3'-phosphate
  modified_base 5: mod_base = OTHER; note = 2'-fluoroadenosine-3'-phosphate
  modified_base 6: mod_base = OTHER; note = 2'-O-methylcytidine-3'-phosphate
  modified_base 7: mod_base = OTHER; note = 2'-fluorocytidine-3'-phosphate
  modified_base 8: mod_base = OTHER; note = 2'-O-methyluridine-3'-phosphate
  modified_base 9: mod_base = OTHER; note = 2'-fluoroguanosine-3'-phosphate
  modified_base 10: mod_base = OTHER; note = 2'-O-methyluridine-3'-phosphate
  modified_base 11: mod_base = OTHER; note = 2'-O-methyluridine-3'-phosphate
  modified_base 12: mod_base = OTHER; note = 2'-O-methyluridine-3'-phosphate
  modified_base 13: mod_base = OTHER; note = 2'-O-methyluridine-3'-phosphate
  modified_base 14: mod_base = OTHER; note = 2'-O-methylguanosine-3'-phosphate
  modified_base 15: mod_base = OTHER; note = 2'-fluorocytidine-3'-phosphate
  modified_base 16: mod_base = OTHER; note = 2'-O-methyluridine-3'-phosphate
  modified_base 17: mod_base = OTHER; note = 2'-O-methyluridine-3'-phosphate
  modified_base 18: mod_base = OTHER; note = 2'-O-methyluridine-3'-phosphate
  modified_base 19: mod_base = OTHER; note = 2'-O-methyluridine-3'-phosphate
  modified_base 20: mod_base = OTHER; note = 2'-O-methylguanosine-3'-phosphate
  modified_base 21: mod_base = OTHER; note = 2'-O-methyluridine-3'-phosphate N-[tris(GalNAc-alkyl)-amidodecanoyl)]-4-hydroxyprolinol Hyp-(GalNAc-alkyl)3
ctagacctgttttgcttttgt

SEQ ID NO: 364 - RNA, 23 nt, synthetic construct
  source 1..23: mol_type = other RNA; note = Description of Artificial Sequence: Synthetic oligonucleotide
  modified_base 1: mod_base = OTHER; note = 2'-O-methyladenosine-3'-phosphorothioate
  modified_base 2: mod_base = OTHER; note = 2'-fluorocytidine-3'-phosphorothioate
  modified_base 3: mod_base = OTHER; note = 2'-O-methyladenosine-3'-phosphate
  modified_base 4: mod_base = OTHER; note = 2'-fluoroadenosine-3'-phosphate
  modified_base 5: mod_base = OTHER; note = 2'-O-methyladenosine-3'-phosphate
  modified_base 6: mod_base = OTHER; note = 2'-fluoroadenosine-3'-phosphorothioate
  modified_base 7: mod_base = OTHER; note = 2'-O-methylguanosine-3'-phosphate
  modified_base 8: mod_base = OTHER; note = 2'-fluorocytidine-3'-phosphate
  modified_base 9: mod_base = OTHER; note = 2'-O-methyladenosine-3'-phosphate
  modified_base 10: mod_base = OTHER; note = 2'-fluoroadenosine-3'-phosphate
  modified_base 11: mod_base = OTHER; note = 2'-O-methyladenosine-3'-phosphate
  modified_base 12: mod_base = OTHER; note = 2'-O-methyladenosine-3'-phosphate
  modified_base 13: mod_base = OTHER; note = 2'-O-methylcytidine-3'-phosphate
  modified_base 14: mod_base = OTHER; note = 2'-fluoroadenosine-3'-phosphate
  modified_base 15: mod_base = OTHER; note = 2'-O-methylguanosine-3'-phosphate
  modified_base 16: mod_base = OTHER; note = 2'-fluoroguanosine-3'-phosphate
  modified_base 17: mod_base = OTHER; note = 2'-O-methyluridine-3'-phosphate
  modified_base 18: mod_base = OTHER; note = 2'-fluorocytidine-3'-phosphate
  modified_base 19: mod_base = OTHER; note = 2'-O-methyluridine-3'-phosphate
  modified_base 20: mod_base = OTHER; note = 2'-fluoroadenosine-3'-phosphate
  modified_base 21: mod_base = OTHER; note = 2'-O-methylguanosine-3'-phosphorothioate
  modified_base 22: mod_base = OTHER; note = 2'-O-methyladenosine-3'-phosphorothioate
  modified_base 23: mod_base = OTHER; note = 2'-O-methyladenosine-3'-phosphate
acaaaagcaaaacaggtctagaa

SEQ ID NO: 365 - RNA, 21 nt, synthetic construct
  source 1..21: mol_type = other RNA; note = Description of Artificial Sequence: Synthetic oligonucleotide
  modified_base 1: mod_base = OTHER; note = 3'-O-methylcytidine-2'-phosphate
  modified_base 2: mod_base = OTHER; note = 2'-O-methyluridine-3'-phosphorothioate
  modified_base 3: mod_base = OTHER; note = 2'-O-methyladenosine-3'-phosphate
  modified_base 4: mod_base = OTHER; note = 2'-O-methylguanosine-3'-phosphate
  modified_base 5: mod_base = OTHER; note = 2'-O-methyladenosine-3'-phosphate
  modified_base 6: mod_base = OTHER; note = 2'-O-methylcytidine-3'-phosphate
  modified_base 7: mod_base = OTHER; note = 2'-O-methylcytidine-3'-phosphate
  modified_base 8: mod_base = OTHER; note = 2'-O-methyluridine-3'-phosphate
  modified_base 9: mod_base = OTHER; note = 2'-O-methylguanosine-3'-phosphate
  modified_base 10: mod_base = OTHER; note = 2'-O-methyluridine-3'-phosphate
  modified_base 11: mod_base = OTHER; note = 2'-O-methyluridine-3'-phosphate
  modified_base 12: mod_base = OTHER; note = 2'-O-methyluridine-3'-phosphate
  modified_base 13: mod_base = OTHER; note = 2'-O-methyluridine-3'-phosphate
  modified_base 14: mod_base = OTHER; note = 2'-O-methylguanosine-3'-phosphate
  modified_base 15: mod_base = OTHER; note = 2'-O-methylcytidine-3'-phosphate
  modified_base 16: mod_base = OTHER; note = 2'-O-methyluridine-3'-phosphate
  modified_base 17: mod_base = OTHER; note = 2'-O-methyluridine-3'-phosphate
  modified_base 18: mod_base = OTHER; note = 2'-O-methyluridine-3'-phosphate
  modified_base 19: mod_base = OTHER; note = 2'-O-methyluridine-3'-phosphate
  modified_base 20: mod_base = OTHER; note = 2'-O-methylguanosine-3'-phosphate
  modified_base 21: mod_base = OTHER; note = 2'-O-methyluridine-3'-phosphate N-[tris(GalNAc-alkyl)-amidodecanoyl)]-4-hydroxyprolinol Hyp-(GalNAc-alkyl)3
ctagacctgttttgcttttgt

SEQ ID NO: 366 - RNA, 23 nt, synthetic construct
  source 1..23: mol_type = other RNA; note = Description of Artificial Sequence: Synthetic oligonucleotide
  modified_base 1: mod_base = OTHER; note = 2'-O-methyladenosine-3'-phosphorothioate
  modified_base 2: mod_base = OTHER; note = 2'-fluorocytidine-3'-phosphorothioate
  modified_base 3: mod_base = OTHER; note = 2'-O-methyladenosine-3'-phosphate
  modified_base 4: mod_base = OTHER; note = 2'-fluoroadenosine-3'-phosphate
  modified_base 5: mod_base = OTHER; note = 2'-O-methyladenosine-3'-phosphate
  modified_base 6: mod_base = OTHER; note = 2'-fluoroadenosine-3'-phosphate
  modified_base 7: mod_base = OTHER; note = 2'-O-methylguanosine-3'-phosphate
  modified_base 8: mod_base = OTHER; note = 2'-fluorocytidine-3'-phosphate
  modified_base 9: mod_base = OTHER; note = 2'-O-methyladenosine-3'-phosphate
  modified_base 10: mod_base = OTHER; note = 2'-fluoroadenosine-3'-phosphate
  modified_base 11: mod_base = OTHER; note = 2'-O-methyladenosine-3'-phosphate
  modified_base 12: mod_base = OTHER; note = 2'-O-methyladenosine-3'-phosphate
  modified_base 13: mod_base = OTHER; note = 2'-O-methylcytidine-3'-phosphate
  modified_base 14: mod_base = OTHER; note = 2'-fluoroadenosine-3'-phosphate
  modified_base 15: mod_base = OTHER; note = 2'-O-methylguanosine-3'-phosphate
  modified_base 16: mod_base = OTHER; note = 2'-fluoroguanosine-3'-phosphate
  modified_base 17: mod_base = OTHER; note = 2'-O-methyluridine-3'-phosphate
  modified_base 18: mod_base = OTHER; note = 2'-fluorocytidine-3'-phosphate
  modified_base 19: mod_base = OTHER; note = 2'-O-methyluridine-3'-phosphate
  modified_base 20: mod_base = OTHER; note = 2'-fluoroadenosine-3'-phosphate
  modified_base 21: mod_base = OTHER; note = 2'-O-methylguanosine-3'-phosphorothioate
  modified_base 22: mod_base = OTHER; note = 2'-O-methyladenosine-3'-phosphorothioate
  modified_base 23: mod_base = OTHER; note = 2'-O-methyladenosine-3'-phosphate
acaaaagcaaaacaggtctagaa

SEQ ID NO: 367 - RNA, 21 nt, synthetic construct
  source 1..21: mol_type = other RNA; note = Description of Artificial Sequence: Synthetic oligonucleotide
  modified_base 1: mod_base = OTHER; note = 3'-O-methylcytidine-2'-phosphate
  modified_base 2: mod_base = OTHER; note = 2'-O-methyluridine-3'-phosphorothioate
  modified_base 3: mod_base = OTHER; note = 2'-fluoroadenosine-3'-phosphate
  modified_base 4: mod_base = OTHER; note = 2'-O-methylguanosine-3'-phosphate
  modified_base 5: mod_base = OTHER; note = 2'-fluoroadenosine-3'-phosphate
  modified_base 6: mod_base = OTHER; note = 2'-O-methylcytidine-3'-phosphate
  modified_base 7: mod_base = OTHER; note = 2'-fluorocytidine-3'-phosphate
  modified_base 8: mod_base = OTHER; note = 2'-O-methyluridine-3'-phosphate
  modified_base 9: mod_base = OTHER; note = 2'-fluoroguanosine-3'-phosphate
  modified_base 10: mod_base = OTHER; note = 2'-O-methyluridine-3'-phosphate
  modified_base 11: mod_base = OTHER; note = 2'-O-methyluridine-3'-phosphate
  modified_base 12: mod_base = OTHER; note = 2'-O-methyluridine-3'-phosphate
  modified_base 13: mod_base = OTHER; note = 2'-O-methyluridine-3'-phosphate
  modified_base 14: mod_base = OTHER; note = 2'-O-methylguanosine-3'-phosphate
  modified_base 15: mod_base = OTHER; note = 2'-fluorocytidine-3'-phosphate
  modified_base 16: mod_base = OTHER; note = 2'-O-methyluridine-3'-phosphate
  modified_base 17: mod_base = OTHER; note = 2'-O-methyluridine-3'-phosphate
  modified_base 18: mod_base = OTHER; note = 2'-O-methyluridine-3'-phosphate
  modified_base 19: mod_base = OTHER; note = 2'-O-methyluridine-3'-phosphate
  modified_base 20: mod_base = OTHER; note = 2'-O-methylguanosine-3'-phosphate
  modified_base 21: mod_base = OTHER; note = 2'-O-methyluridine-3'-phosphate N-[tris(GalNAc-alkyl)-amidodecanoyl)]-4-hydroxyprolinol Hyp-(GalNAc-alkyl)3
ctagacctgttttgcttttgt

SEQ ID NO: 368 - RNA, 23 nt, synthetic construct
  source 1..23: mol_type = other RNA; note = Description of Artificial Sequence: Synthetic oligonucleotide
  modified_base 1: mod_base = OTHER; note = 2'-O-methyladenosine-3'-phosphorothioate
  modified_base 2: mod_base = OTHER; note = 2'-fluorocytidine-3'-phosphorothioate
  modified_base 3: mod_base = OTHER; note = 2'-O-methyladenosine-3'-phosphate
  modified_base 4: mod_base = OTHER; note = 2'-fluoroadenosine-3'-phosphate
  modified_base 5: mod_base = OTHER; note = 2'-O-methyladenosine-3'-phosphate
  modified_base 6: mod_base = OTHER; note = 2'-fluoroadenosine-3'-phosphate
  modified_base 7: mod_base = OTHER; note = 2'-O-methylguanosine-3'-phosphate
  modified_base 8: mod_base = OTHER; note = 2'-fluorocytidine-3'-phosphate
  modified_base 9: mod_base = OTHER; note = 2'-O-methyladenosine-3'-phosphate
  modified_base 10: mod_base = OTHER; note = 2'-fluoroadenosine-3'-phosphate
  modified_base 11: mod_base = OTHER; note = 2'-O-methyladenosine-3'-phosphate
  modified_base 12: mod_base = OTHER; note = 2'-O-methyladenosine-3'-phosphate
  modified_base 13: mod_base = OTHER; note = 2'-O-methylcytidine-3'-phosphate
  modified_base 14: mod_base = OTHER; note = 2'-fluoroadenosine-3'-phosphate
  modified_base 15: mod_base = OTHER; note = 2'-O-methylguanosine-3'-phosphate
  modified_base 16: mod_base = OTHER; note = 2'-fluoroguanosine-3'-phosphate
  modified_base 17: mod_base = OTHER; note = 2'-O-methyluridine-3'-phosphate
  modified_base 18: mod_base = OTHER; note = 2'-fluorocytidine-3'-phosphate
  modified_base 19: mod_base = OTHER; note = 2'-O-methyluridine-3'-phosphate
  modified_base 20: mod_base = OTHER; note = 2'-fluoroadenosine-3'-phosphate
  modified_base 21: mod_base = OTHER; note = 2'-O-methylguanosine-3'-phosphorothioate
  modified_base 22: mod_base = OTHER; note = 2'-O-methyladenosine-3'-phosphorothioate
  modified_base 23: mod_base = OTHER; note = 2'-O-methyladenosine-3'-phosphate
acaaaagcaaaacaggtctagaa

SEQ ID NO: 369 - RNA, 21 nt, synthetic construct
  source 1..21: mol_type = other RNA; note = Description of Artificial Sequence: Synthetic oligonucleotide
  modified_base 1: mod_base = OTHER; note = 2'-fluorocytidine-3'-phosphorothioate
  modified_base 2: mod_base = OTHER; note = 2'-O-methyluridine-3'-phosphorothioate
  modified_base 3: mod_base = OTHER; note = 2'-fluoroadenosine-3'-phosphate
  modified_base 4: mod_base = OTHER; note = 2'-O-methylguanosine-3'-phosphate
  modified_base 5: mod_base = OTHER; note = 2'-fluoroadenosine-3'-phosphate
  modified_base 6: mod_base = OTHER; note = 2'-O-methylcytidine-3'-phosphate
  modified_base 7: mod_base = OTHER; note = 2'-fluorocytidine-3'-phosphate
  modified_base 8: mod_base = OTHER; note = 2'-O-methyluridine-3'-phosphate
  modified_base 9: mod_base = OTHER; note = 2'-fluoroguanosine-3'-phosphate
  modified_base 10: mod_base = OTHER; note = 2'-fluorouridine-3'-phosphate
  modified_base 11: mod_base = OTHER; note = 2'-fluorouridine-3'-phosphate
  modified_base 12: mod_base = OTHER; note = 2'-O-methyluridine-3'-phosphate
  modified_base 13: mod_base = OTHER; note = 2'-O-methyluridine-3'-phosphate
  modified_base 14: mod_base = OTHER; note = 2'-O-methylguanosine-3'-phosphate
  modified_base 15: mod_base = OTHER; note = 2'-fluorocytidine-3'-phosphate
  modified_base 16: mod_base = OTHER; note = 2'-O-methyluridine-3'-phosphate
  modified_base 17: mod_base = OTHER; note = 2'-O-methyluridine-3'-phosphate
  modified_base 18: mod_base = OTHER; note = 2'-O-methyluridine-3'-phosphate
  modified_base 19: mod_base = OTHER; note = 2'-O-methyluridine-3'-phosphate
  modified_base 20: mod_base = OTHER; note = 2'-O-methylguanosine-3'-phosphate
  modified_base 21: mod_base = OTHER; note = 2'-O-methyluridine-3'-phosphate N-[tris(GalNAc-alkyl)-amidodecanoyl)]-4-hydroxyprolinol Hyp-(GalNAc-alkyl)3
ctagacctgttttgcttttgt

SEQ ID NO: 370 - RNA, 23 nt, synthetic construct
  source 1..23: mol_type = other RNA; note = Description of Artificial Sequence: Synthetic oligonucleotide
  modified_base 1: mod_base = OTHER; note = 2'-O-methyladenosine-3'-phosphorothioate
  modified_base 2: mod_base = OTHER; note = 2'-fluorocytidine-3'-phosphorothioate
  modified_base 3: mod_base = OTHER; note = 2'-O-methyladenosine-3'-phosphate
  modified_base 4: mod_base = OTHER; note = 2'-fluoroadenosine-3'-phosphate
  modified_base 5: mod_base = OTHER; note = 2'-O-methyladenosine-3'-phosphate
  modified_base 6: mod_base = OTHER; note = 2'-fluoroadenosine-3'-phosphate
  modified_base 7: mod_base = OTHER; note = 2'-O-methylguanosine-3'-phosphate
  modified_base 8: mod_base = OTHER; note = 2'-fluorocytidine-3'-phosphate
  modified_base 9: mod_base = OTHER; note = 2'-O-methyladenosine-3'-phosphate
  modified_base 10: mod_base = OTHER; note = 2'-fluoroadenosine-3'-phosphate
  modified_base 11: mod_base = OTHER; note = 2'-O-methyladenosine-3'-phosphate
  modified_base 12: mod_base = OTHER; note = 2'-O-methyladenosine-3'-phosphate
  modified_base 13: mod_base = OTHER; note = 2'-O-methylcytidine-3'-phosphate
  modified_base 14: mod_base = OTHER; note = 2'-fluoroadenosine-3'-phosphate
  modified_base 15: mod_base = OTHER; note = 2'-O-methylguanosine-3'-phosphate
  modified_base 16: mod_base = OTHER; note = 2'-fluoroguanosine-3'-phosphate
  modified_base 17: mod_base = OTHER; note = 2'-O-methyluridine-3'-phosphate
  modified_base 18: mod_base = OTHER; note = 2'-fluorocytidine-3'-phosphate
  modified_base 19: mod_base = OTHER; note = 2'-O-methyluridine-3'-phosphate
  modified_base 20: mod_base = OTHER; note = 2'-fluoroadenosine-3'-phosphate
  modified_base 21: mod_base = OTHER; note = 2'-O-methylguanosine-3'-phosphorothioate
  modified_base 22: mod_base = OTHER; note = 3'-O-methyladenosine-2'-phosphate
  modified_base 23: mod_base = OTHER; note = 2'-O-methyladenosine-3'-phosphate
acaaaagcaaaacaggtctagaa

SEQ ID NO: 371 - RNA, 21 nt, synthetic construct
  source 1..21: mol_type = other RNA; note = Description of Artificial Sequence: Synthetic oligonucleotide
  modified_base 1: mod_base = OTHER; note = 2'-fluorocytidine-3'-phosphorothioate
  modified_base 2: mod_base = OTHER; note = 2'-O-methyluridine-3'-phosphorothioate
  modified_base 3: mod_base = OTHER; note = 2'-fluoroadenosine-3'-phosphate
  modified_base 4: mod_base = OTHER; note = 2'-O-methylguanosine-3'-phosphate
  modified_base 5: mod_base = OTHER; note = 2'-fluoroadenosine-3'-phosphate
  modified_base 6: mod_base = OTHER; note = 2'-O-methylcytidine-3'-phosphate
  modified_base 7: mod_base = OTHER; note = 2'-fluorocytidine-3'-phosphate
  modified_base 8: mod_base = OTHER; note = 2'-O-methyluridine-3'-phosphate
  modified_base 9: mod_base = OTHER; note = 2'-fluoroguanosine-3'-phosphate
  modified_base 10: mod_base = OTHER; note = 2'-O-methyluridine-3'-phosphate
  modified_base 11: mod_base = OTHER; note = 2'-O-methyluridine-3'-phosphate
  modified_base 12: mod_base = OTHER; note = 2'-O-methyluridine-3'-phosphate
  modified_base 13: mod_base = OTHER; note = 2'-O-methyluridine-3'-phosphate
  modified_base 14: mod_base = OTHER; note = 2'-O-methylguanosine-3'-phosphate
  modified_base 15: mod_base = OTHER; note = 2'-fluorocytidine-3'-phosphate
  modified_base 16: mod_base = OTHER; note = 2'-O-methyluridine-3'-phosphate
  modified_base 17: mod_base = OTHER; note = 2'-O-methyluridine-3'-phosphate
  modified_base 18: mod_base = OTHER; note = 2'-O-methyluridine-3'-phosphate
  modified_base 19: mod_base = OTHER; note = 2'-O-methyluridine-3'-phosphate
  modified_base 20: mod_base = OTHER; note = 2'-O-methylguanosine-3'-phosphate
  modified_base 21: mod_base = OTHER; note = 2'-O-methyluridine-3'-phosphate N-[tris(GalNAc-alkyl)-amidodecanoyl)]-4-hydroxyprolinol Hyp-(GalNAc-alkyl)3
ctagacctgttttgcttttgt

SEQ ID NO: 372 - RNA, 23 nt, synthetic construct
  source 1..23: mol_type = other RNA; note = Description of Artificial Sequence: Synthetic oligonucleotide
  modified_base 1: mod_base = OTHER; note = 2'-O-methyladenosine-3'-phosphorothioate
  modified_base 2: mod_base = OTHER; note = 2'-fluorocytidine-3'-phosphorothioate
  modified_base 3: mod_base = OTHER; note = 2'-O-methyladenosine-3'-phosphate
  modified_base 4: mod_base = OTHER; note = 2'-fluoroadenosine-3'-phosphate
  modified_base 5: mod_base = OTHER; note = 2'-O-methyladenosine-3'-phosphate
  modified_base 6: mod_base = OTHER; note = 2'-fluoroadenosine-3'-phosphate
  modified_base 7: mod_base = OTHER; note = 2'-O-methylguanosine-3'-phosphate
  modified_base 8: mod_base = OTHER; note = 2'-fluorocytidine-3'-phosphate
  modified_base 9: mod_base = OTHER; note = 2'-O-methyladenosine-3'-phosphate
  modified_base 10: mod_base = OTHER; note = 2'-fluoroadenosine-3'-phosphate
  modified_base 11: mod_base = OTHER; note = 2'-O-methyladenosine-3'-phosphate
  modified_base 12: mod_base = OTHER; note = 2'-O-methyladenosine-3'-phosphate
  modified_base 13: mod_base = OTHER; note = 2'-O-methylcytidine-3'-phosphate
  modified_base 14: mod_base = OTHER; note = 2'-fluoroadenosine-3'-phosphate
  modified_base 15: mod_base = OTHER; note = 2'-O-methylguanosine-3'-phosphate
  modified_base 16: mod_base = OTHER; note = 2'-fluoroguanosine-3'-phosphate
  modified_base 17: mod_base = OTHER; note = 2'-O-methyluridine-3'-phosphate
  modified_base 18: mod_base = OTHER; note = 2'-fluorocytidine-3'-phosphate
  modified_base 19: mod_base = OTHER; note = 2'-O-methyluridine-3'-phosphate
  modified_base 20: mod_base = OTHER; note = 2'-fluoroadenosine-3'-phosphate
  modified_base 21: mod_base = OTHER; note = 2'-O-methylguanosine-3'-phosphorothioate
  modified_base 22: mod_base = OTHER; note = 3'-O-methyladenosine-2'-phosphate
  modified_base 23: mod_base = OTHER; note = 2'-O-methyladenosine-3'-phosphate
acaaaagcaaaacaggtctagaa

SEQ ID NO: 373 - RNA, 21 nt, synthetic construct
  source 1..21: mol_type = other RNA; note = Description of Artificial Sequence: Synthetic oligonucleotide
  modified_base 1: mod_base = OTHER; note = 3'-O-methylcytidine-2'-phosphate
  modified_base 2: mod_base = OTHER; note = 2'-O-methyluridine-3'-phosphorothioate
  modified_base 3: mod_base = OTHER; note = 2'-fluoroadenosine-3'-phosphate
  modified_base 4: mod_base = OTHER; note = 2'-O-methylguanosine-3'-phosphate
  modified_base 5: mod_base = OTHER; note = 2'-fluoroadenosine-3'-phosphate
  modified_base 6: mod_base = OTHER; note = 2'-O-methylcytidine-3'-phosphate
  modified_base 7: mod_base = OTHER; note = 2'-fluorocytidine-3'-phosphate
  modified_base 8: mod_base = OTHER; note = 2'-O-methyluridine-3'-phosphate
  modified_base 9: mod_base = OTHER; note = 2'-fluoroguanosine-3'-phosphate
  modified_base 10: mod_base = OTHER; note = 2'-O-methyluridine-3'-phosphate
  modified_base 11: mod_base = OTHER; note = 2'-O-methyluridine-3'-phosphate
  modified_base 12: mod_base = OTHER; note = 2'-O-methyluridine-3'-phosphate
  modified_base 13: mod_base = OTHER; note = 2'-O-methyluridine-3'-phosphate
  modified_base 14: mod_base = OTHER; note = 2'-O-methylguanosine-3'-phosphate
  modified_base 15: mod_base = OTHER; note = 2'-fluorocytidine-3'-phosphate
  modified_base 16: mod_base = OTHER; note = 2'-O-methyluridine-3'-phosphate
  modified_base 17: mod_base = OTHER; note = 2'-O-methyluridine-3'-phosphate
  modified_base 18: mod_base = OTHER; note = 2'-O-methyluridine-3'-phosphate
  modified_base 19: mod_base = OTHER; note = 2'-O-methyluridine-3'-phosphate
  modified_base 20: mod_base = OTHER; note = 2'-O-methylguanosine-3'-phosphate
  modified_base 21: mod_base = OTHER; note = 2'-O-methyluridine-3'-phosphate N-[tris(GalNAc-alkyl)-amidodecanoyl)]-4-hydroxyprolinol Hyp-(GalNAc-alkyl)3
ctagacctgttttgcttttgt

SEQ ID NO: 374 - RNA, 23 nt, synthetic construct
  source 1..23: mol_type = other RNA; note = Description of Artificial Sequence: Synthetic oligonucleotide
  modified_base 1: mod_base = OTHER; note = 2'-O-methyladenosine-3'-phosphorothioate
  modified_base 2: mod_base = OTHER; note = 2'-fluorocytidine-3'-phosphorothioate
  modified_base 3: mod_base = OTHER; note = 2'-O-methyladenosine-3'-phosphate
  modified_base 4: mod_base = OTHER; note = 2'-fluoroadenosine-3'-phosphate
  modified_base 5: mod_base = OTHER; note = 2'-O-methyladenosine-3'-phosphate
  modified_base 6: mod_base = OTHER; note = 2'-fluoroadenosine-3'-phosphate
  modified_base 7: mod_base = OTHER; note = 2'-O-methylguanosine-3'-phosphate
  modified_base 8: mod_base = OTHER; note = 2'-fluorocytidine-3'-phosphate
  modified_base 9: mod_base = OTHER; note = 2'-O-methyladenosine-3'-phosphate
  modified_base 10: mod_base = OTHER; note = 2'-fluoroadenosine-3'-phosphate
  modified_base 11: mod_base = OTHER; note = 2'-O-methyladenosine-3'-phosphate
  modified_base 12: mod_base = OTHER; note = 2'-O-methyladenosine-3'-phosphate
  modified_base 13: mod_base = OTHER; note = 2'-O-methylcytidine-3'-phosphate
  modified_base 14: mod_base = OTHER; note = 2'-fluoroadenosine-3'-phosphate
  modified_base 15: mod_base = OTHER; note = 2'-O-methylguanosine-3'-phosphate
  modified_base 16: mod_base = OTHER; note = 2'-fluoroguanosine-3'-phosphate
  modified_base 17: mod_base = OTHER; note = 2'-O-methyluridine-3'-phosphate
  modified_base 18: mod_base = OTHER; note = 2'-fluorocytidine-3'-phosphate
  modified_base 19: mod_base = OTHER; note = 2'-O-methyluridine-3'-phosphate
  modified_base 20: mod_base = OTHER; note = 2'-fluoroadenosine-3'-phosphate
  modified_base 21: mod_base = OTHER; note = 2'-O-methylguanosine-3'-phosphorothioate
  modified_base 22: mod_base = OTHER; note = 3'-O-methyladenosine-2'-phosphate
  modified_base 23: mod_base = OTHER; note = 2'-O-methyladenosine-3'-phosphate
acaaaagcaaaacaggtctagaa

SEQ ID NO: 375 - RNA, 21 nt, synthetic construct
  source 1..21: mol_type = other RNA; note = Description of Artificial Sequence: Synthetic oligonucleotide
  modified_base 1: mod_base = OTHER; note = 3'-O-methylcytidine-2'-phosphate
  modified_base 2: mod_base = OTHER; note = 2'-O-methyluridine-3'-phosphorothioate
  modified_base 3: mod_base = OTHER; note = 2'-O-methyladenosine-3'-phosphate
  modified_base 4: mod_base = OTHER; note = 2'-O-methylguanosine-3'-phosphate
  modified_base 5: mod_base = OTHER; note = 2'-O-methyladenosine-3'-phosphate
  modified_base 6: mod_base = OTHER; note = 2'-O-methylcytidine-3'-phosphate
  modified_base 7: mod_base = OTHER; note = 2'-O-methylcytidine-3'-phosphate
  modified_base 8: mod_base = OTHER; note = 2'-O-methyluridine-3'-phosphate
  modified_base 9: mod_base = OTHER; note = 2'-O-methylguanosine-3'-phosphate
  modified_base 10: mod_base = OTHER; note = 2'-O-methyluridine-3'-phosphate
  modified_base 11: mod_base = OTHER; note = 2'-O-methyluridine-3'-phosphate
  modified_base 12: mod_base = OTHER; note = 2'-O-methyluridine-3'-phosphate
  modified_base 13: mod_base = OTHER; note = 2'-O-methyluridine-3'-phosphate
  modified_base 14: mod_base = OTHER; note = 2'-O-methylguanosine-3'-phosphate
  modified_base 15: mod_base = OTHER; note = 2'-O-methylcytidine-3'-phosphate
  modified_base 16: mod_base = OTHER; note = 2'-O-methyluridine-3'-phosphate
  modified_base 17: mod_base = OTHER; note = 2'-O-methyluridine-3'-phosphate
  modified_base 18: mod_base = OTHER; note = 2'-O-methyluridine-3'-phosphate
  modified_base 19: mod_base = OTHER; note = 2'-O-methyluridine-3'-phosphate
  modified_base 20: mod_base = OTHER; note = 2'-O-methylguanosine-3'-phosphate
  modified_base 21: mod_base = OTHER; note = 2'-O-methyluridine-3'-phosphate N-[tris(GalNAc-alkyl)-amidodecanoyl)]-4-hydroxyprolinol Hyp-(GalNAc-alkyl)3
ctagacctgttttgcttttgt

SEQ ID NO: 376 - RNA, 23 nt, synthetic construct
  source 1..23: mol_type = other RNA; note = Description of Artificial Sequence: Synthetic oligonucleotide
  modified_base 1: mod_base = OTHER; note = 2'-O-methyladenosine-3'-phosphorothioate
  modified_base 2: mod_base = OTHER; note = 2'-fluorocytidine-3'-phosphorothioate
  modified_base 3: mod_base = OTHER; note = 2'-O-methyladenosine-3'-phosphate
  modified_base 4: mod_base = OTHER; note = 2'-fluoroadenosine-3'-phosphate
  modified_base 5: mod_base = OTHER; note = 2'-O-methyladenosine-3'-phosphate
  modified_base 6: mod_base = OTHER; note = 2'-fluoroadenosine-3'-phosphate
  modified_base 7: mod_base = OTHER; note = 2'-O-methylguanosine-3'-phosphate
  modified_base 8: mod_base = OTHER; note = 2'-fluorocytidine-3'-phosphate
  modified_base 9: mod_base = OTHER; note = 2'-O-methyladenosine-3'-phosphate
  modified_base 10: mod_base = OTHER; note = 2'-fluoroadenosine-3'-phosphate
  modified_base 11: mod_base = OTHER; note = 2'-O-methyladenosine-3'-phosphate
  modified_base 12: mod_base = OTHER; note = 2'-O-methyladenosine-3'-phosphate
  modified_base 13: mod_base = OTHER; note = 2'-O-methylcytidine-3'-phosphate
  modified_base 14: mod_base = OTHER; note = 2'-fluoroadenosine-3'-phosphate
  modified_base 15: mod_base = OTHER; note = 2'-O-methylguanosine-3'-phosphate
  modified_base 16: mod_base = OTHER; note = 2'-fluoroguanosine-3'-phosphate
  modified_base 17: mod_base = OTHER; note = 2'-O-methyluridine-3'-phosphate
  modified_base 18: mod_base = OTHER; note = 2'-fluorocytidine-3'-phosphate
  modified_base 19: mod_base = OTHER; note = 2'-O-methyluridine-3'-phosphate
  modified_base 20: mod_base = OTHER; note = 2'-fluoroadenosine-3'-phosphate
  modified_base 21: mod_base = OTHER; note = 2'-O-methylguanosine-3'-phosphorothioate
  modified_base 22: mod_base = OTHER; note = 3'-O-methyladenosine-2'-phosphate
  modified_base 23: mod_base = OTHER; note = 2'-O-methyladenosine-3'-phosphate
acaaaagcaaaacaggtctagaa

SEQ ID NO: 377 - RNA, 21 nt, synthetic construct
  source 1..21: mol_type = other RNA; note = Description of Artificial Sequence: Synthetic oligonucleotide
  modified_base 1: mod_base = OTHER; note = 3'-O-methylcytidine-2'-phosphate
  modified_base 2: mod_base = OTHER; note = 2'-O-methyluridine-3'-phosphorothioate
  modified_base 3: mod_base = OTHER; note = 2'-O-methyladenosine-3'-phosphate
  modified_base 4: mod_base = OTHER; note = 2'-O-methylguanosine-3'-phosphate
  modified_base 5: mod_base = OTHER; note = 2'-O-methyladenosine-3'-phosphate
  modified_base 6: mod_base = OTHER; note = 2'-O-methylcytidine-3'-phosphate
  modified_base 7: mod_base = OTHER; note = 2'-O-methylcytidine-3'-phosphate
  modified_base 8: mod_base = OTHER; note = 2'-O-methyluridine-3'-phosphate
  modified_base 9: mod_base = OTHER; note = 2'-O-methylguanosine-3'-phosphate
  modified_base 10: mod_base = OTHER; note = 2'-O-methyluridine-3'-phosphate
  modified_base 11: mod_base = OTHER; note = 2'-O-methyluridine-3'-phosphate
  modified_base 12: mod_base = OTHER; note = 2'-O-methyluridine-3'-phosphate
  modified_base 13: mod_base = OTHER; note = 2'-O-methyluridine-3'-phosphate
  modified_base 14: mod_base = OTHER; note = 2'-O-methylguanosine-3'-phosphate
  modified_base 15: mod_base = OTHER; note = 2'-O-methylcytidine-3'-phosphate
  modified_base 16: mod_base = OTHER; note = 2'-O-methyluridine-3'-phosphate
  modified_base 17: mod_base = OTHER; note = 2'-O-methyluridine-3'-phosphate
  modified_base 18: mod_base = OTHER; note = 2'-O-methyluridine-3'-phosphate
  modified_base 19: mod_base = OTHER; note = 2'-O-methyluridine-3'-phosphate
  modified_base 20: mod_base = OTHER; note = 2'-O-methylguanosine-3'-phosphate
  modified_base 21: mod_base = OTHER; note = 2'-O-methyluridine-3'-phosphate N-[tris(GalNAc-alkyl)-amidodecanoyl)]-4-hydroxyprolinol Hyp-(GalNAc-alkyl)3
ctagacctgttttgcttttgt

SEQ ID NO: 378 - RNA, 23 nt, synthetic construct
  source 1..23: mol_type = other RNA; note = Description of Artificial Sequence: Synthetic oligonucleotide
  modified_base 1: mod_base = OTHER; note = 2'-O-methyladenosine-3'-phosphorothioate
  modified_base 2: mod_base = OTHER; note = 2'-fluorocytidine-3'-phosphorothioate
  modified_base 3: mod_base = OTHER; note = 2'-O-methyladenosine-3'-phosphate
  modified_base 4: mod_base = OTHER; note = 2'-fluoroadenosine-3'-phosphate
  modified_base 5: mod_base = OTHER; note = 2'-O-methyladenosine-3'-phosphate
  modified_base 6: mod_base = OTHER; note = 2'-fluoroadenosine-3'-phosphate
  modified_base 7: mod_base = OTHER; note = 2'-O-methylguanosine-3'-phosphate
  modified_base 8: mod_base = OTHER; note = 2'-fluorocytidine-3'-phosphate
  modified_base 9: mod_base = OTHER; note = 2'-O-methyladenosine-3'-phosphate
  modified_base 10: mod_base = OTHER; note = 2'-fluoroadenosine-3'-phosphate
  modified_base 11: mod_base = OTHER; note = 2'-O-methyladenosine-3'-phosphate
  modified_base 12: mod_base = OTHER; note = 2'-O-methyladenosine-3'-phosphate
  modified_base 13: mod_base = OTHER; note = 2'-O-methylcytidine-3'-phosphate
  modified_base 14: mod_base = OTHER; note = 2'-fluoroadenosine-3'-phosphate
  modified_base 15: mod_base = OTHER; note = 2'-O-methylguanosine-3'-phosphate
  modified_base 16: mod_base = OTHER; note = 2'-fluoroguanosine-3'-phosphate
  modified_base 17: mod_base = OTHER; note = 2'-O-methyluridine-3'-phosphate
  modified_base 18: mod_base = OTHER; note = 2'-fluorocytidine-3'-phosphate
  modified_base 19: mod_base = OTHER; note = 2'-O-methyluridine-3'-phosphate
  modified_base 20: mod_base = OTHER; note = 2'-fluoroadenosine-3'-phosphate
  modified_base 21: mod_base = OTHER; note = 2'-O-methylguanosine-3'-phosphorothioate
  modified_base 22: mod_base = OTHER; note = 3'-O-methyladenosine-2'-phosphate
  modified_base 23: mod_base = OTHER; note = 2'-O-methyladenosine-3'-phosphate
acaaaagcaaaacaggtctagaa

SEQ ID NO: 379 - RNA, 21 nt, synthetic construct
  source 1..21: mol_type = other RNA; note = Description of Artificial Sequence: Synthetic oligonucleotide
  modified_base 1: mod_base = OTHER; note = cytidine-3'-phosphorothioate
  modified_base 2: mod_base = OTHER; note = 2'-O-methyluridine-3'-phosphorothioate
  modified_base 3: mod_base = OTHER; note = 2'-O-methyladenosine-3'-phosphate
  modified_base 4: mod_base = OTHER; note = 2'-O-methylguanosine-3'-phosphate
  modified_base 5: mod_base = OTHER; note = 2'-O-methyladenosine-3'-phosphate
  modified_base 6: mod_base = OTHER; note = 2'-O-methylcytidine-3'-phosphate
  modified_base 7: mod_base = OTHER; note = 2'-O-methylcytidine-3'-phosphate
  modified_base 8: mod_base = OTHER; note = 2'-O-methyluridine-3'-phosphate
  modified_base 9: mod_base = OTHER; note = 2'-fluoroguanosine-3'-phosphate
  modified_base 10: mod_base = OTHER; note = 2'-fluorouridine-3'-phosphate
  modified_base 11: mod_base = OTHER; note = 2'-fluorouridine-3'-phosphate
  modified_base 12: mod_base = OTHER; note = 2'-O-methyluridine-3'-phosphate
  modified_base 13: mod_base = OTHER; note = 2'-O-methyluridine-3'-phosphate
  modified_base 14: mod_base = OTHER; note = 2'-O-methylguanosine-3'-phosphate
  modified_base 15: mod_base = OTHER; note = 2'-O-methylcytidine-3'-phosphate
  modified_base 16: mod_base = OTHER; note = 2'-O-methyluridine-3'-phosphate
  modified_base 17: mod_base = OTHER; note = 2'-O-methyluridine-3'-phosphate
  modified_base 18: mod_base = OTHER; note = 2'-O-methyluridine-3'-phosphate
  modified_base 19: mod_base = OTHER; note = 2'-O-methyluridine-3'-phosphate
  modified_base 20: mod_base = OTHER; note = 2'-O-methylguanosine-3'-phosphate
  modified_base 21: mod_base = OTHER; note = 2'-O-methyluridine-3'-phosphate N-[tris(GalNAc-alkyl)-amidodecanoyl)]-4-hydroxyprolinol Hyp-(GalNAc-alkyl)3
ctagacctgttttgcttttgt

SEQ ID NO: 380 - RNA, 23 nt, synthetic construct
  source 1..23: mol_type = other RNA; note = Description of Artificial Sequence: Synthetic oligonucleotide
  modified_base 1: mod_base = OTHER; note = 2'-O-methyladenosine-3'-phosphorothioate
  modified_base 2: mod_base = OTHER; note = 2'-fluorocytidine-3'-phosphorothioate
  modified_base 3: mod_base = OTHER; note = 2'-O-methyladenosine-3'-phosphate
  modified_base 4: mod_base = OTHER; note = 2'-fluoroadenosine-3'-phosphate
  modified_base 5: mod_base = OTHER; note = 2'-O-methyladenosine-3'-phosphate
  modified_base 6: mod_base = OTHER; note = 2'-fluoroadenosine-3'-phosphate
  modified_base 7: mod_base = OTHER; note = 2'-O-methylguanosine-3'-phosphate
  modified_base 8: mod_base = OTHER; note = 2'-fluorocytidine-3'-phosphate
  modified_base 9: mod_base = OTHER; note = 2'-O-methyladenosine-3'-phosphate
  modified_base 10: mod_base = OTHER; note = 2'-fluoroadenosine-3'-phosphate
  modified_base 11: mod_base = OTHER; note = 2'-O-methyladenosine-3'-phosphate
  modified_base 12: mod_base = OTHER; note = 2'-O-methyladenosine-3'-phosphate
  modified_base 13: mod_base = OTHER; note = 2'-O-methylcytidine-3'-phosphate
  modified_base 14: mod_base = OTHER; note = 2'-fluoroadenosine-3'-phosphate
  modified_base 15: mod_base = OTHER; note = 2'-O-methylguanosine-3'-phosphate
  modified_base 16: mod_base = OTHER; note = 2'-fluoroguanosine-3'-phosphate
  modified_base 17: mod_base = OTHER; note = 2'-O-methyluridine-3'-phosphate
  modified_base 18: mod_base = OTHER; note = 2'-fluorocytidine-3'-phosphate
  modified_base 19: mod_base = OTHER; note = 2'-O-methyluridine-3'-phosphate
  modified_base 20: mod_base = OTHER; note = 2'-fluoroadenosine-3'-phosphate
  modified_base 21: mod_base = OTHER; note = 2'-O-methylguanosine-3'-phosphorothioate
  modified_base 22: mod_base = OTHER; note = 3'-O-methyladenosine-2'-phosphate
  modified_base 23: mod_base = OTHER; note = 2'-O-methyladenosine-3'-phosphate
acaaaagcaaaacaggtctagaa

SEQ ID NO: 381 - RNA, 21 nt, synthetic construct
  source 1..21: mol_type = other RNA; note = Description of Artificial Sequence: Synthetic oligonucleotide
  modified_base 1: mod_base = OTHER; note = 2'-fluorocytidine-3'-phosphorothioate
  modified_base 2: mod_base = OTHER; note = 2'-O-methyluridine-3'-phosphorothioate
  modified_base 3: mod_base = OTHER; note = 2'-fluoroadenosine-3'-phosphate
  modified_base 4: mod_base = OTHER; note = 2'-O-methylguanosine-3'-phosphate
  modified_base 5: mod_base = OTHER; note = 2'-fluoroadenosine-3'-phosphate
  modified_base 6: mod_base = OTHER; note = 2'-O-methylcytidine-3'-phosphate
  modified_base 7: mod_base = OTHER; note = 2'-fluorocytidine-3'-phosphate
  modified_base 8: mod_base = OTHER; note = 2'-O-methyluridine-3'-phosphate
  modified_base 9: mod_base = OTHER; note = 2'-fluoroguanosine-3'-phosphate
  modified_base 10: mod_base = OTHER; note = 2'-fluorouridine-3'-phosphate
  modified_base 11: mod_base = OTHER; note = 2'-fluorouridine-3'-phosphate
  modified_base 12: mod_base = OTHER; note = 2'-O-methyluridine-3'-phosphate
  modified_base 13: mod_base = OTHER; note = 2'-fluorouridine-3'-phosphate
  modified_base 14: mod_base = OTHER; note = 2'-O-methylguanosine-3'-phosphate
  modified_base 15: mod_base = OTHER; note = 2'-fluorocytidine-3'-phosphate
  modified_base 16: mod_base = OTHER; note = 2'-O-methyluridine-3'-phosphate
  modified_base 17: mod_base = OTHER; note = 2'-fluorouridine-3'-phosphate
  modified_base 18: mod_base = OTHER; note = 2'-O-methyluridine-3'-phosphate
  modified_base 19: mod_base = OTHER; note = 2'-fluorouridine-3'-phosphate
  modified_base 20: mod_base = OTHER; note = 2'-O-methylguanosine-3'-phosphate
  modified_base 21: mod_base = OTHER; note = 2'-fluorouridine-3'-phosphate N-[tris(GalNAc-alkyl)-amidodecanoyl)]-4-hydroxyprolinol Hyp-(GalNAc-alkyl)3
ctagacctgttttgcttttgt

SEQ ID NO: 382 - RNA, 23 nt, synthetic construct
  source 1..23: mol_type = other RNA; note = Description of Artificial Sequence: Synthetic oligonucleotide
  modified_base 1: mod_base = OTHER; note = 2'-O-methyladenosine-3'-phosphorothioate
  modified_base 2: mod_base = OTHER; note = 2'-fluorocytidine-3'-phosphorothioate
  modified_base 3: mod_base = OTHER; note = 2'-O-methyladenosine-3'-phosphate
  modified_base 4: mod_base = OTHER; note = 2'-fluoroadenosine-3'-phosphate
  modified_base 5: mod_base = OTHER; note = 2'-O-methyladenosine-3'-phosphate
  modified_base 6: mod_base = OTHER; note = 2'-fluoroadenosine-3'-phosphate
  modified_base 7: mod_base = OTHER; note = 2'-O-methylguanosine-3'-phosphate
  modified_base 8: mod_base = OTHER; note = 2'-fluorocytidine-3'-phosphate
  modified_base 9: mod_base = OTHER; note = 2'-O-methyladenosine-3'-phosphate
  modified_base 10: mod_base = OTHER; note = 2'-fluoroadenosine-3'-phosphate
  modified_base 11: mod_base = OTHER; note = 2'-O-methyladenosine-3'-phosphate
  modified_base 12: mod_base = OTHER; note = 2'-O-methyladenosine-3'-phosphate
  modified_base 13: mod_base = OTHER; note = 2'-O-methylcytidine-3'-phosphate
  modified_base 14: mod_base = OTHER; note = 2'-fluoroadenosine-3'-phosphate
  modified_base 15: mod_base = OTHER; note = 2'-O-methylguanosine-3'-phosphate
  modified_base 16: mod_base = OTHER; note = 2'-fluoroguanosine-3'-phosphate
  modified_base 17: mod_base = OTHER; note = 2'-O-methyluridine-3'-phosphate
  modified_base 18: mod_base = OTHER; note = 2'-fluorocytidine-3'-phosphate
  modified_base 19: mod_base = OTHER; note = 2'-O-methyluridine-3'-phosphate
  modified_base 20: mod_base = OTHER; note = 2'-fluoroadenosine-3'-phosphate
  modified_base 21: mod_base = OTHER; note = 2'-O-methylguanosine-3'-phosphorothioate
  modified_base 22: mod_base = OTHER; note = 2'-O-methyladenosine-3'-phosphorothioate
  modified_base 23: mod_base = OTHER; note = 2'-O-methyladenosine-3'-phosphate
acaaaagcaaaacaggtctagaa

SEQ ID NO: 383 - RNA, 21 nt, synthetic construct
  source 1..21: mol_type = other RNA; note = Description of Artificial Sequence: Synthetic oligonucleotide
  modified_base 1: mod_base = OTHER; note = 2'-fluorocytidine-3'-phosphorothioate
  modified_base 2: mod_base = OTHER; note = 2'-O-methyluridine-3'-phosphate
  modified_base 3: mod_base = OTHER; note = 2'-fluoroadenosine-3'-phosphate
  modified_base 4: mod_base = OTHER; note = 2'-O-methylguanosine-3'-phosphate
  modified_base 5: mod_base = OTHER; note = 2'-fluoroadenosine-3'-phosphate
  modified_base 6: mod_base = OTHER; note = 2'-O-methylcytidine-3'-phosphate
  modified_base 7: mod_base = OTHER; note = 2'-fluorocytidine-3'-phosphate
  modified_base 8: mod_base = OTHER; note = 2'-O-methyluridine-3'-phosphate
  modified_base 9: mod_base = OTHER; note = 2'-fluoroguanosine-3'-phosphate
  modified_base 10: mod_base = OTHER; note = 2'-fluorouridine-3'-phosphate
  modified_base 11: mod_base = OTHER; note = 2'-fluorouridine-3'-phosphate
  modified_base 12: mod_base = OTHER; note = 2'-O-methyluridine-3'-phosphate
  modified_base 13: mod_base = OTHER; note = 2'-fluorouridine-3'-phosphate
  modified_base 14: mod_base = OTHER; note = 2'-O-methylguanosine-3'-phosphate
  modified_base 15: mod_base = OTHER; note = 2'-fluorocytidine-3'-phosphate
  modified_base 16: mod_base = OTHER; note = 2'-O-methyluridine-3'-phosphate
  modified_base 17: mod_base = OTHER; note = 2'-fluorouridine-3'-phosphate
  modified_base 18: mod_base = OTHER; note = 2'-O-methyluridine-3'-phosphate
  modified_base 19: mod_base = OTHER; note = 2'-fluorouridine-3'-phosphate
  modified_base 20: mod_base = OTHER; note = 2'-O-methylguanosine-3'-phosphate
  modified_base 21: mod_base = OTHER; note = 2'-fluorouridine-3'-phosphate N-[tris(GalNAc-alkyl)-amidodecanoyl)]-4-hydroxyprolinol Hyp-(GalNAc-alkyl)3
ctagacctgttttgcttttgt

SEQ ID NO: 384 - RNA, 23 nt, synthetic construct
  source 1..23: mol_type = other RNA; note = Description of Artificial Sequence: Synthetic oligonucleotide
  modified_base 1: mod_base = OTHER; note = 2'-O-methyladenosine-3'-phosphorothioate
  modified_base 2: mod_base = OTHER; note = 2'-fluorocytidine-3'-phosphate
  modified_base 3: mod_base = OTHER; note = 2'-O-methyladenosine-3'-phosphate
  modified_base 4: mod_base = OTHER; note = 2'-fluoroadenosine-3'-phosphate
  modified_base 5: mod_base = OTHER; note = 2'-O-methyladenosine-3'-phosphate
  modified_base 6: mod_base = OTHER; note = 2'-fluoroadenosine-3'-phosphate
  modified_base 7: mod_base = OTHER; note = 2'-O-methylguanosine-3'-phosphate
  modified_base 8: mod_base = OTHER; note = 2'-fluorocytidine-3'-phosphate
  modified_base 9: mod_base = OTHER; note = 2'-O-methyladenosine-3'-phosphate
  modified_base 10: mod_base = OTHER; note = 2'-fluoroadenosine-3'-phosphate
  modified_base 11: mod_base = OTHER; note = 2'-O-methyladenosine-3'-phosphate
  modified_base 12: mod_base = OTHER; note = 2'-O-methyladenosine-3'-phosphate
  modified_base 13: mod_base = OTHER; note = 2'-O-methylcytidine-3'-phosphate
  modified_base 14: mod_base = OTHER; note = 2'-fluoroadenosine-3'-phosphate
  modified_base 15: mod_base = OTHER; note = 2'-O-methylguanosine-3'-phosphate
  modified_base 16: mod_base = OTHER; note = 2'-fluoroguanosine-3'-phosphate
  modified_base 17: mod_base = OTHER; note = 2'-O-methyluridine-3'-phosphate
  modified_base 18: mod_base = OTHER; note = 2'-fluorocytidine-3'-phosphate
  modified_base 19: mod_base = OTHER; note = 2'-O-methyluridine-3'-phosphate
  modified_base 20: mod_base = OTHER; note = 2'-fluoroadenosine-3'-phosphate
  modified_base 21: mod_base = OTHER; note = 2'-O-methylguanosine-3'-phosphate
  modified_base 22: mod_base = OTHER; note = 2'-O-methyladenosine-3'-phosphorothioate
  modified_base 23: mod_base = OTHER; note = 2'-O-methyladenosine-3'-phosphate
acaaaagcaaaacaggtctagaa

SEQ ID NO: 385 - RNA, 21 nt, synthetic construct
  source 1..21: mol_type = other RNA; note = Description of Artificial Sequence: Synthetic oligonucleotide
  modified_base 1: mod_base = OTHER; note = 2'-fluorocytidine-3'-phosphate
  modified_base 2: mod_base = OTHER; note = 2'-O-methyluridine-3'-phosphorothioate
  modified_base 3: mod_base = OTHER; note = 2'-fluoroadenosine-3'-phosphate
  modified_base 4: mod_base = OTHER; note = 2'-O-methylguanosine-3'-phosphate
  modified_base 5: mod_base = OTHER; note = 2'-fluoroadenosine-3'-phosphate
  modified_base 6: mod_base = OTHER; note = 2'-O-methylcytidine-3'-phosphate
  modified_base 7: mod_base = OTHER; note = 2'-fluorocytidine-3'-phosphate
  modified_base 8: mod_base = OTHER; note = 2'-O-methyluridine-3'-phosphate
  modified_base 9: mod_base = OTHER; note = 2'-fluoroguanosine-3'-phosphate
  modified_base 10: mod_base = OTHER; note = 2'-fluorouridine-3'-phosphate
  modified_base 11: mod_base = OTHER; note = 2'-fluorouridine-3'-phosphate
  modified_base 12: mod_base = OTHER; note = 2'-O-methyluridine-3'-phosphate
  modified_base 13: mod_base = OTHER; note = 2'-fluorouridine-3'-phosphate
  modified_base 14: mod_base = OTHER; note = 2'-O-methylguanosine-3'-phosphate
  modified_base 15: mod_base = OTHER; note = 2'-fluorocytidine-3'-phosphate
  modified_base 16: mod_base = OTHER; note = 2'-O-methyluridine-3'-phosphate
  modified_base 17: mod_base = OTHER; note = 2'-fluorouridine-3'-phosphate
  modified_base 18: mod_base = OTHER; note = 2'-O-methyluridine-3'-phosphate
  modified_base 19: mod_base = OTHER; note = 2'-fluorouridine-3'-phosphate
  modified_base 20: mod_base = OTHER; note = 2'-O-methylguanosine-3'-phosphate
  modified_base 21: mod_base = OTHER; note = 2'-fluorouridine-3'-phosphate N-[tris(GalNAc-alkyl)-amidodecanoyl)]-4-hydroxyprolinol Hyp-(GalNAc-alkyl)3
ctagacctgttttgcttttgt

SEQ ID NO: 386 - RNA, 23 nt, synthetic construct
  source 1..23: mol_type = other RNA; note = Description of Artificial Sequence: Synthetic oligonucleotide
  modified_base 1: mod_base = OTHER; note = 2'-O-methyladenosine-3'-phosphate
  modified_base 2: mod_base = OTHER; note = 2'-fluorocytidine-3'-phosphorothioate
  modified_base 3: mod_base = OTHER; note = 2'-O-methyladenosine-3'-phosphate
  modified_base 4: mod_base = OTHER; note = 2'-fluoroadenosine-3'-phosphate
  modified_base 5: mod_base = OTHER; note = 2'-O-methyladenosine-3'-phosphate
  modified_base 6: mod_base = OTHER; note = 2'-fluoroadenosine-3'-phosphate
  modified_base 7: mod_base = OTHER; note = 2'-O-methylguanosine-3'-phosphate
  modified_base 8: mod_base = OTHER; note = 2'-fluorocytidine-3'-phosphate
  modified_base 9: mod_base = OTHER; note = 2'-O-methyladenosine-3'-phosphate
  modified_base 10: mod_base = OTHER; note = 2'-fluoroadenosine-3'-phosphate
  modified_base 11: mod_base = OTHER; note = 2'-O-methyladenosine-3'-phosphate
  modified_base 12: mod_base = OTHER; note = 2'-O-methyladenosine-3'-phosphate
  modified_base 13: mod_base = OTHER; note = 2'-O-methylcytidine-3'-phosphate
  modified_base 14: mod_base = OTHER; note = 2'-fluoroadenosine-3'-phosphate
  modified_base 15: mod_base = OTHER; note = 2'-O-methylguanosine-3'-phosphate
  modified_base 16: mod_base = OTHER; note = 2'-fluoroguanosine-3'-phosphate
  modified_base 17: mod_base = OTHER; note = 2'-O-methyluridine-3'-phosphate
  modified_base 18: mod_base = OTHER; note = 2'-fluorocytidine-3'-phosphate
  modified_base 19: mod_base = OTHER; note = 2'-O-methyluridine-3'-phosphate
  modified_base 20: mod_base = OTHER; note = 2'-fluoroadenosine-3'-phosphate
  modified_base 21: mod_base = OTHER; note = 2'-O-methylguanosine-3'-phosphorothioate
  modified_base 22: mod_base = OTHER; note = 2'-O-methyladenosine-3'-phosphate
  modified_base 23: mod_base = OTHER; note = 2'-O-methyladenosine-3'-phosphate
acaaaagcaaaacaggtctagaa

SEQ ID NO: 387 - RNA, 21 nt, synthetic construct
  source 1..21: mol_type = other RNA; note = Description of Artificial Sequence: Synthetic oligonucleotide
  modified_base 1: mod_base = OTHER; note = 2'-fluorocytidine-3'-phosphate
  modified_base 2: mod_base = OTHER; note = 2'-O-methyluridine-3'-phosphate
  modified_base 3: mod_base = OTHER; note = 2'-fluoroadenosine-3'-phosphate
  modified_base 4: mod_base = OTHER; note = 2'-O-methylguanosine-3'-phosphate
  modified_base 5: mod_base = OTHER; note = 2'-fluoroadenosine-3'-phosphate
  modified_base 6: mod_base = OTHER; note = 2'-O-methylcytidine-3'-phosphate
  modified_base 7: mod_base = OTHER; note = 2'-fluorocytidine-3'-phosphate
  modified_base 8: mod_base = OTHER; note = 2'-O-methyluridine-3'-phosphate
  modified_base 9: mod_base = OTHER; note = 2'-fluoroguanosine-3'-phosphate
  modified_base 10: mod_base = OTHER; note = 2'-fluorouridine-3'-phosphate
  modified_base 11: mod_base = OTHER; note = 2'-fluorouridine-3'-phosphate
  modified_base 12: mod_base = OTHER; note = 2'-O-methyluridine-3'-phosphate
  modified_base 13: mod_base = OTHER; note = 2'-fluorouridine-3'-phosphate
  modified_base 14: mod_base = OTHER; note = 2'-O-methylguanosine-3'-phosphate
  modified_base 15: mod_base = OTHER; note = 2'-fluorocytidine-3'-phosphate
  modified_base 16: mod_base = OTHER; note = 2'-O-methyluridine-3'-phosphate
  modified_base 17: mod_base = OTHER; note = 2'-fluorouridine-3'-phosphate
  modified_base 18: mod_base = OTHER; note = 2'-O-methyluridine-3'-phosphate
  modified_base 19: mod_base = OTHER; note = 2'-fluorouridine-3'-phosphate
  modified_base 20: mod_base = OTHER; note = 2'-O-methylguanosine-3'-phosphate
  modified_base 21: mod_base = OTHER; note = 2'-fluorouridine-3'-phosphate N-[tris(GalNAc-alkyl)-amidodecanoyl)]-4-hydroxyprolinol Hyp-(GalNAc-alkyl)3
ctagacctgttttgcttttgt

SEQ ID NO: 388 - RNA, 23 nt, synthetic construct
  source 1..23: mol_type = other RNA; note = Description of Artificial Sequence: Synthetic oligonucleotide
  modified_base 1: mod_base = OTHER; note = 2'-O-methyladenosine-3'-phosphorothioate
  modified_base 2: mod_base = OTHER; note = 2'-fluorocytidine-3'-phosphorothioate
  modified_base 3: mod_base = OTHER; note = 2'-O-methyladenosine-3'-phosphate
  modified_base 4: mod_base = OTHER; note = 2'-fluoroadenosine-3'-phosphate
  modified_base 5: mod_base = OTHER; note = 2'-O-methyladenosine-3'-phosphate
  modified_base 6: mod_base = OTHER; note = 2'-fluoroadenosine-3'-phosphate
  modified_base 7: mod_base = OTHER; note = 2'-O-methylguanosine-3'-phosphate
  modified_base 8: mod_base = OTHER; note = 2'-fluorocytidine-3'-phosphate
  modified_base 9: mod_base = OTHER; note = 2'-O-methyladenosine-3'-phosphate
  modified_base 10: mod_base = OTHER; note = 2'-fluoroadenosine-3'-phosphate
  modified_base 11: mod_base = OTHER; note = 2'-O-methyladenosine-3'-phosphate
  modified_base 12: mod_base = OTHER; note = 2'-O-methyladenosine-3'-phosphate
  modified_base 13: mod_base = OTHER; note = 2'-O-methylcytidine-3'-phosphate
  modified_base 14: mod_base = OTHER; note = 2'-fluoroadenosine-3'-phosphate
  modified_base 15: mod_base = OTHER; note = 2'-O-methylguanosine-3'-phosphate
  modified_base 16: mod_base = OTHER; note = 2'-fluoroguanosine-3'-phosphate
  modified_base 17: mod_base = OTHER; note = 2'-O-methyluridine-3'-phosphate
  modified_base 18: mod_base = OTHER; note = 2'-fluorocytidine-3'-phosphate
  modified_base 19: mod_base = OTHER; note = 2'-O-methyluridine-3'-phosphate
  modified_base 20: mod_base = OTHER; note = 2'-fluoroadenosine-3'-phosphate
  modified_base 21: mod_base = OTHER; note = 2'-O-methylguanosine-3'-phosphorothioate
  modified_base 22: mod_base = OTHER; note = 2'-O-methyladenosine-3'-phosphorothioate
  modified_base 23: mod_base = OTHER; note = 2'-O-methyladenosine-3'-phosphate
acaaaagcaaaacaggtctagaa

SEQ ID NO: 389 - RNA, 21 nt, synthetic construct
  source 1..21: mol_type = other RNA; note = Description of Artificial Sequence: Synthetic oligonucleotide
  modified_base 1: mod_base = OTHER; note = 2'-fluorocytidine-3'-phosphorothioate
  modified_base 2: mod_base = OTHER; note = 2'-O-methyluridine-3'-phosphorothioate
  modified_base 3: mod_base = OTHER; note = 2'-fluoroadenosine-3'-phosphate
  modified_base 4: mod_base = OTHER; note = 2'-O-methylguanosine-3'-phosphate
  modified_base 5: mod_base = OTHER; note = 2'-fluoroadenosine-3'-phosphate
  modified_base 6: mod_base = OTHER; note = 2'-O-methylcytidine-3'-phosphate
  modified_base 7: mod_base = OTHER; note = 2'-fluorocytidine-3'-phosphate
  modified_base 8: mod_base = OTHER; note = 2'-O-methyluridine-3'-phosphate
  modified_base 9: mod_base = OTHER; note = 2'-fluoroguanosine-3'-phosphate
  modified_base 10: mod_base = OTHER; note = 2'-fluorouridine-3'-phosphate
  modified_base 11: mod_base = OTHER; note = 2'-fluorouridine-3'-phosphate
  modified_base 12: mod_base = OTHER; note = 2'-O-methyluridine-3'-phosphate
  modified_base 13: mod_base = OTHER; note = 2'-fluorouridine-3'-phosphate
  modified_base 14: mod_base = OTHER; note = 2'-O-methylguanosine-3'-phosphate
  modified_base 15: mod_base = OTHER; note = 2'-fluorocytidine-3'-phosphate
  modified_base 16: mod_base = OTHER; note = 2'-O-methyluridine-3'-phosphate
  modified_base 17: mod_base = OTHER; note = 2'-fluorouridine-3'-phosphate
  modified_base 18: mod_base = OTHER; note = 2'-O-methyluridine-3'-phosphate
  modified_base 19: mod_base = OTHER; note = 2'-fluorouridine-3'-phosphate
  modified_base 20: mod_base = OTHER; note = 2'-O-methylguanosine-3'-phosphate
  modified_base 21: mod_base = OTHER; note = 2'-fluorouridine-3'-phosphate N-[tris(GalNAc-alkyl)-amidodecanoyl)]-4-hydroxyprolinol Hyp-(GalNAc-alkyl)3
ctagacctgttttgcttttgt

SEQ ID NO: 390 - RNA, 23 nt, synthetic construct
  source 1..23: mol_type = other RNA; note = Description of Artificial Sequence: Synthetic oligonucleotide
  modified_base 1: mod_base = OTHER; note = 2'-O-methyladenosine-3'-phosphate
  modified_base 2: mod_base = OTHER; note = 2'-fluorocytidine-3'-phosphate
  modified_base 3: mod_base = OTHER; note = 2'-O-methyladenosine-3'-phosphate
  modified_base 4: mod_base = OTHER; note = 2'-fluoroadenosine-3'-phosphate
  modified_base 5: mod_base = OTHER; note = 2'-O-methyladenosine-3'-phosphate
  modified_base 6: mod_base = OTHER; note = 2'-fluoroadenosine-3'-phosphate
  modified_base 7: mod_base = OTHER; note = 2'-O-methylguanosine-3'-phosphate
  modified_base 8: mod_base = OTHER; note = 2'-fluorocytidine-3'-phosphate
  modified_base 9: mod_base = OTHER; note = 2'-O-methyladenosine-3'-phosphate
  modified_base 10: mod_base = OTHER; note = 2'-fluoroadenosine-3'-phosphate
  modified_base 11: mod_base = OTHER; note = 2'-O-methyladenosine-3'-phosphate
  modified_base 12: mod_base = OTHER; note = 2'-O-methyladenosine-3'-phosphate
  modified_base 13: mod_base = OTHER; note = 2'-O-methylcytidine-3'-phosphate
  modified_base 14: mod_base = OTHER; note = 2'-fluoroadenosine-3'-phosphate
  modified_base 15: mod_base = OTHER; note = 2'-O-methylguanosine-3'-phosphate
  modified_base 16: mod_base = OTHER; note = 2'-fluoroguanosine-3'-phosphate
  modified_base 17: mod_base = OTHER; note = 2'-O-methyluridine-3'-phosphate
  modified_base 18: mod_base = OTHER; note = 2'-fluorocytidine-3'-phosphate
  modified_base 19: mod_base = OTHER; note = 2'-O-methyluridine-3'-phosphate
  modified_base 20: mod_base = OTHER; note = 2'-fluoroadenosine-3'-phosphate
  modified_base 21: mod_base = OTHER; note = 2'-O-methylguanosine-3'-phosphate
  modified_base 22: mod_base = OTHER; note = 2'-O-methyladenosine-3'-phosphate
  modified_base 23: mod_base = OTHER; note = 2'-O-methyladenosine-3'-phosphate
acaaaagcaaaacaggtctagaa

SEQ ID NO: 391 - RNA, 21 nt, synthetic construct
  source 1..21: mol_type = other RNA; note = Description of Artificial Sequence: Synthetic oligonucleotide
  modified_base 1: mod_base = OTHER; note = 2'-fluorocytidine-3'-phosphorothioate
  modified_base 2: mod_base = OTHER; note = 2'-O-methyluridine-3'-phosphorothioate
  modified_base 3: mod_base = OTHER; note = 2'-fluoroadenosine-3'-phosphorothioate
  modified_base 4: mod_base = OTHER; note = 2'-O-methylguanosine-3'-phosphate
  modified_base 5: mod_base = OTHER; note = 2'-fluoroadenosine-3'-phosphate
  modified_base 6: mod_base = OTHER; note = 2'-O-methylcytidine-3'-phosphate
  modified_base 7: mod_base = OTHER; note = 2'-fluorocytidine-3'-phosphate
  modified_base 8: mod_base = OTHER; note = 2'-O-methyluridine-3'-phosphate
  modified_base 9: mod_base = OTHER; note = 2'-fluoroguanosine-3'-phosphate
  modified_base 10: mod_base = OTHER; note = 2'-fluorouridine-3'-phosphate
  modified_base 11: mod_base = OTHER; note = 2'-fluorouridine-3'-phosphate
  modified_base 12: mod_base = OTHER; note = 2'-O-methyluridine-3'-phosphate
  modified_base 13: mod_base = OTHER; note = 2'-fluorouridine-3'-phosphate
  modified_base 14: mod_base = OTHER; note = 2'-O-methylguanosine-3'-phosphate
  modified_base 15: mod_base = OTHER; note = 2'-fluorocytidine-3'-phosphate
  modified_base 16: mod_base = OTHER; note = 2'-O-methyluridine-3'-phosphate
  modified_base 17: mod_base = OTHER; note = 2'-fluorouridine-3'-phosphate
  modified_base 18: mod_base = OTHER; note = 2'-O-methyluridine-3'-phosphate
  modified_base 19: mod_base = OTHER; note = 2'-fluorouridine-3'-phosphate
  modified_base 20: mod_base = OTHER; note = 2'-O-methylguanosine-3'-phosphate
  modified_base 21: mod_base = OTHER; note = 2'-fluorouridine-3'-phosphate N-[tris(GalNAc-alkyl)-amidodecanoyl)]-4-hydroxyprolinol Hyp-(GalNAc-alkyl)3
ctagacctgttttgcttttgt

SEQ ID NO: 392 - RNA, 23 nt, synthetic construct
  source 1..23: mol_type = other RNA; note = Description of Artificial Sequence: Synthetic oligonucleotide
  modified_base 1: mod_base = OTHER; note = 2'-O-methyladenosine-3'-phosphorothioate
  modified_base 2: mod_base = OTHER; note = 2'-fluorocytidine-3'-phosphorothioate
  modified_base 3: mod_base = OTHER; note = 2'-O-methyladenosine-3'-phosphorothioate
  modified_base 4: mod_base = OTHER; note = 2'-fluoroadenosine-3'-phosphate
  modified_base 5: mod_base = OTHER; note = 2'-O-methyladenosine-3'-phosphate
  modified_base 6: mod_base = OTHER; note = 2'-fluoroadenosine-3'-phosphate
  modified_base 7: mod_base = OTHER; note = 2'-O-methylguanosine-3'-phosphate
  modified_base 8: mod_base = OTHER; note = 2'-fluorocytidine-3'-phosphate
  modified_base 9: mod_base = OTHER; note = 2'-O-methyladenosine-3'-phosphate
  modified_base 10: mod_base = OTHER; note = 2'-fluoroadenosine-3'-phosphate
  modified_base 11: mod_base = OTHER; note = 2'-O-methyladenosine-3'-phosphate
  modified_base 12: mod_base = OTHER; note = 2'-O-methyladenosine-3'-phosphate
  modified_base 13: mod_base = OTHER; note = 2'-O-methylcytidine-3'-phosphate
  modified_base 14: mod_base = OTHER; note = 2'-fluoroadenosine-3'-phosphate
  modified_base 15: mod_base = OTHER; note = 2'-O-methylguanosine-3'-phosphate
  modified_base 16: mod_base = OTHER; note = 2'-fluoroguanosine-3'-phosphate
  modified_base 17: mod_base = OTHER; note = 2'-O-methyluridine-3'-phosphate
  modified_base 18: mod_base = OTHER; note = 2'-fluorocytidine-3'-phosphate
  modified_base 19: mod_base = OTHER; note = 2'-O-methyluridine-3'-phosphate
  modified_base 20: mod_base = OTHER; note = 2'-fluoroadenosine-3'-phosphorothioate
  modified_base 21: mod_base = OTHER; note = 2'-O-methylguanosine-3'-phosphorothioate
  modified_base 22: mod_base = OTHER; note = 2'-O-methyladenosine-3'-phosphorothioate
  modified_base 23: mod_base = OTHER; note = 2'-O-methyladenosine-3'-phosphate
acaaaagcaaaacaggtctagaa

SEQ ID NO: 393 - RNA, 21 nt, synthetic construct
  source 1..21: mol_type = other RNA; note = Description of Artificial Sequence: Synthetic oligonucleotide
  modified_base 1: mod_base = OTHER; note = 2'-fluorocytidine-3'-phosphorothioate
  modified_base 2: mod_base = OTHER; note = 2'-O-methyluridine-3'-phosphorothioate
  modified_base 3: mod_base = OTHER; note = 2'-fluoroadenosine-3'-phosphorothioate
  modified_base 4: mod_base = OTHER; note = 2'-O-methylguanosine-3'-phosphate
  modified_base 5: mod_base = OTHER; note = 2'-fluoroadenosine-3'-phosphate
  modified_base 6: mod_base = OTHER; note = 2'-O-methylcytidine-3'-phosphate
  modified_base 7: mod_base = OTHER; note = 2'-fluorocytidine-3'-phosphate
  modified_base 8: mod_base = OTHER; note = 2'-O-methyluridine-3'-phosphate
  modified_base 9: mod_base = OTHER; note = 2'-fluoroguanosine-3'-phosphate
  modified_base 10: mod_base = OTHER; note = 2'-fluorouridine-3'-phosphate
  modified_base 11: mod_base = OTHER; note = 2'-fluorouridine-3'-phosphate
  modified_base 12: mod_base = OTHER; note = 2'-O-methyluridine-3'-phosphate
  modified_base 13: mod_base = OTHER; note = 2'-fluorouridine-3'-phosphate
  modified_base 14: mod_base = OTHER; note = 2'-O-methylguanosine-3'-phosphate
  modified_base 15: mod_base = OTHER; note = 2'-fluorocytidine-3'-phosphate
  modified_base 16: mod_base = OTHER; note = 2'-O-methyluridine-3'-phosphate
  modified_base 17: mod_base = OTHER; note = 2'-fluorouridine-3'-phosphate
  modified_base 18: mod_base = OTHER; note = 2'-O-methyluridine-3'-phosphate
  modified_base 19: mod_base = OTHER; note = 2'-fluorouridine-3'-phosphate
  modified_base 20: mod_base = OTHER; note = 2'-O-methylguanosine-3'-phosphate
  modified_base 21: mod_base = OTHER; note = 2'-fluorouridine-3'-phosphate N-[tris(GalNAc-alkyl)-amidodecanoyl)]-4-hydroxyprolinol Hyp-(GalNAc-alkyl)3
ctagacctgttttgcttttgt

SEQ ID NO: 394 - RNA, 23 nt, synthetic construct
  source 1..23: mol_type = other RNA; note = Description of Artificial Sequence: Synthetic oligonucleotide
  modified_base 1: mod_base = OTHER; note = 2'-O-methyladenosine-3'-phosphorothioate
  modified_base 2: mod_base = OTHER; note = 2'-fluorocytidine-3'-phosphorothioate
  modified_base 3: mod_base = OTHER; note = 2'-O-methyladenosine-3'-phosphate
  modified_base 4: mod_base = OTHER; note = 2'-fluoroadenosine-3'-phosphate
  modified_base 5: mod_base = OTHER; note = 2'-O-methyladenosine-3'-phosphate
  modified_base 6: mod_base = OTHER; note = 2'-fluoroadenosine-3'-phosphate
  modified_base 7: mod_base = OTHER; note = 2'-O-methylguanosine-3'-phosphate
  modified_base 8: mod_base = OTHER; note = 2'-fluorocytidine-3'-phosphorothioate
  modified_base 9: mod_base = OTHER; note = 2'-O-methyladenosine-3'-phosphate
  modified_base 10: mod_base = OTHER; note = 2'-fluoroadenosine-3'-phosphate
  modified_base 11: mod_base = OTHER; note = 2'-O-methyladenosine-3'-phosphate
  modified_base 12: mod_base = OTHER; note = 2'-O-methyladenosine-3'-phosphate
  modified_base 13: mod_base = OTHER; note = 2'-O-methylcytidine-3'-phosphate
  modified_base 14: mod_base = OTHER; note = 2'-fluoroadenosine-3'-phosphorothioate
  modified_base 15: mod_base = OTHER; note = 2'-O-methylguanosine-3'-phosphate
  modified_base 16: mod_base = OTHER; note = 2'-fluoroguanosine-3'-phosphate
  modified_base 17: mod_base = OTHER; note = 2'-O-methyluridine-3'-phosphate
  modified_base 18: mod_base = OTHER; note = 2'-fluorocytidine-3'-phosphate
  modified_base 19: mod_base = OTHER; note = 2'-O-methyluridine-3'-phosphate
  modified_base 20: mod_base = OTHER; note = 2'-fluoroadenosine-3'-phosphorothioate
  modified_base 21: mod_base = OTHER; note = 2'-O-methylguanosine-3'-phosphorothioate
  modified_base 22: mod_base = OTHER; note = 2'-O-methyladenosine-3'-phosphorothioate
  modified_base 23: mod_base = OTHER; note = 2'-O-methyladenosine-3'-phosphate
acaaaagcaaaacaggtctagaa

SEQ ID NO: 395 - RNA, 21 nt, synthetic construct
  source 1..21: mol_type = other RNA; note = Description of Artificial Sequence: Synthetic oligonucleotide
  modified_base 1: mod_base = OTHER; note = 2'-fluorocytidine-3'-phosphorothioate
  modified_base 2: mod_base = OTHER; note = 2'-O-methyluridine-3'-phosphorothioate
  modified_base 3: mod_base = OTHER; note = 2'-fluoroadenosine-3'-phosphorothioate
  modified_base 4: mod_base = OTHER; note = 2'-O-methylguanosine-3'-phosphate
  modified_base 5: mod_base = OTHER; note = 2'-fluoroadenosine-3'-phosphate
  modified_base 6: mod_base = OTHER; note = 2'-O-methylcytidine-3'-phosphate
  modified_base 7: mod_base = OTHER; note = 2'-fluorocytidine-3'-phosphate
  modified_base 8: mod_base = OTHER; note = 2'-O-methyluridine-3'-phosphate
  modified_base 9: mod_base = OTHER; note = 2'-fluoroguanosine-3'-phosphate
  modified_base 10: mod_base = OTHER; note = 2'-fluorouridine-3'-phosphate
  modified_base 11: mod_base = OTHER; note = 2'-fluorouridine-3'-phosphate
  modified_base 12: mod_base = OTHER; note = 2'-O-methyluridine-3'-phosphate
  modified_base 13: mod_base = OTHER; note = 2'-fluorouridine-3'-phosphate
  modified_base 14: mod_base = OTHER; note = 2'-O-methylguanosine-3'-phosphate
  modified_base 15: mod_base = OTHER; note = 2'-fluorocytidine-3'-phosphate
  modified_base 16: mod_base = OTHER; note = 2'-O-methyluridine-3'-phosphate
  modified_base 17: mod_base = OTHER; note = 2'-fluorouridine-3'-phosphate
  modified_base 18: mod_base = OTHER; note = 2'-O-methyluridine-3'-phosphate
  modified_base 19: mod_base = OTHER; note = 2'-fluorouridine-3'-phosphorothioate
  modified_base 20: mod_base = OTHER; note = 2'-O-methylguanosine-3'-phosphate
  modified_base 21: mod_base = OTHER; note = 2'-fluorouridine-3'-phosphate N-[tris(GalNAc-alkyl)-amidodecanoyl)]-4-hydroxyprolinol Hyp-(GalNAc-alkyl)3
ctagacctgttttgcttttgt

SEQ ID NO: 396 - RNA, 23 nt, synthetic construct
  source 1..23: mol_type = other RNA; note = Description of Artificial Sequence: Synthetic oligonucleotide
  modified_base 1: mod_base = OTHER; note = 2'-O-methyladenosine-3'-phosphorothioate
  modified_base 2: mod_base = OTHER; note = 2'-fluorocytidine-3'-phosphorothioate
  modified_base 3: mod_base = OTHER; note = 2'-O-methyladenosine-3'-phosphate
  modified_base 4: mod_base = OTHER; note = 2'-fluoroadenosine-3'-phosphate
  modified_base 5: mod_base = OTHER; note = 2'-O-methyladenosine-3'-phosphate
  modified_base 6: mod_base = OTHER; note = 2'-fluoroadenosine-3'-phosphate
  modified_base 7: mod_base = OTHER; note = 2'-O-methylguanosine-3'-phosphate
  modified_base 8: mod_base = OTHER; note = 2'-fluorocytidine-3'-phosphorothioate
  modified_base 9: mod_base = OTHER; note = 2'-O-methyladenosine-3'-phosphate
  modified_base 10: mod_base = OTHER; note = 2'-fluoroadenosine-3'-phosphate
  modified_base 11: mod_base = OTHER; note = 2'-O-methyladenosine-3'-phosphate
  modified_base 12: mod_base = OTHER; note = 2'-O-methyladenosine-3'-phosphate
  modified_base 13: mod_base = OTHER; note = 2'-O-methylcytidine-3'-phosphate
  modified_base 14: mod_base = OTHER; note = 2'-fluoroadenosine-3'-phosphorothioate
  modified_base 15: mod_base = OTHER; note = 2'-O-methylguanosine-3'-phosphate
  modified_base 16: mod_base = OTHER; note = 2'-fluoroguanosine-3'-phosphate
  modified_base 17: mod_base = OTHER; note = 2'-O-methyluridine-3'-phosphate
  modified_base 18: mod_base = OTHER; note = 2'-fluorocytidine-3'-phosphate
  modified_base 19: mod_base = OTHER; note = 2'-O-methyluridine-3'-phosphate
  modified_base 20: mod_base = OTHER; note = 2'-fluoroadenosine-3'-phosphorothioate
  modified_base 21: mod_base = OTHER; note = 2'-O-methylguanosine-3'-phosphorothioate
  modified_base 22: mod_base = OTHER; note = 2'-O-methyladenosine-3'-phosphorothioate
  modified_base 23: mod_base = OTHER; note = 2'-O-methyladenosine-3'-phosphate
acaaaagcaaaacaggtctagaa

SEQ ID NO: 397 - RNA, 21 nt, synthetic construct
  source 1..21: mol_type = other RNA; note = Description of Artificial Sequence: Synthetic oligonucleotide
  modified_base 1: mod_base = OTHER; note = 2'-fluorouridine-3'-phosphate
  modified_base 2: mod_base = OTHER; note = 2'-O-methylcytidine-3'-phosphate
  modified_base 3: mod_base = OTHER; note = 2'-fluorouridine-3'-phosphate
  modified_base 4: mod_base = OTHER; note = 2'-O-methyladenosine-3'-phosphate
  modified_base 5: mod_base = OTHER; note = 2'-fluoroguanosine-3'-phosphate
  modified_base 6: mod_base = OTHER; note = 2'-O-methyladenosine-3'-phosphate
  modified_base 7: mod_base = OTHER; note = 2'-fluorocytidine-3'-phosphate
  modified_base 8: mod_base = OTHER; note = 2'-O-methylcytidine-3'-phosphate
  modified_base 9: mod_base = OTHER; note = 2'-fluorouridine-3'-phosphate
  modified_base 10: mod_base = OTHER; note = 2'-fluoroguanosine-3'-phosphate
  modified_base 11: mod_base = OTHER; note = 2'-fluorouridine-3'-phosphate
  modified_base 12: mod_base = OTHER; note = 2'-O-methyluridine-3'-phosphate
  modified_base 13: mod_base = OTHER; note = 2'-fluorouridine-3'-phosphate
  modified_base 14: mod_base = OTHER; note = 2'-O-methyluridine-3'-phosphate
  modified_base 15: mod_base = OTHER; note = 2'-fluoroguanosine-3'-phosphate
  modified_base 16: mod_base = OTHER; note = 2'-O-methylcytidine-3'-phosphate
  modified_base 17: mod_base = OTHER; note = 2'-fluorouridine-3'-phosphate
  modified_base 18: mod_base = OTHER; note = 2'-O-methyluridine-3'-phosphate
  modified_base 19: mod_base = OTHER; note = 2'-fluorouridine-3'-phosphate
  modified_base 20: mod_base = OTHER; note = 2'-O-methyluridine-3'-phosphate
  modified_base 21: mod_base = OTHER; note = 2'-fluorouridine-3'-phosphate N-[tris(GalNAc-alkyl)-amidodecanoyl)]-4-hydroxyprolinol Hyp-(GalNAc-alkyl)3
tctagacctgttttgcttttt

SEQ ID NO: 398 - RNA, 23 nt, synthetic construct
  source 1..23: mol_type = other RNA; note = Description of Artificial Sequence: Synthetic oligonucleotide
  modified_base 1: mod_base = OTHER; note = 2'-O-methyladenosine-3'-phosphate
  modified_base 2: mod_base = OTHER; note = 2'-fluoroadenosine-3'-phosphate
  modified_base 3: mod_base = OTHER; note = 2'-O-methyladenosine-3'-phosphate
  modified_base 4: mod_base = OTHER; note = 2'-fluoroadenosine-3'-phosphate
  modified_base 5: mod_base = OTHER; note = 2'-O-methyladenosine-3'-phosphate
  modified_base 6: mod_base = OTHER; note = 2'-fluoroguanosine-3'-phosphate
  modified_base 7: mod_base = OTHER; note = 2'-O-methylcytidine-3'-phosphate
  modified_base 8: mod_base = OTHER; note = 2'-fluoroadenosine-3'-phosphate
  modified_base 9: mod_base = OTHER; note = 2'-O-methyladenosine-3'-phosphate
  modified_base 10: mod_base = OTHER; note = 2'-fluoroadenosine-3'-phosphate
  modified_base 11: mod_base = OTHER; note = 2'-O-methyladenosine-3'-phosphate
  modified_base 12: mod_base = OTHER; note = 2'-O-methylcytidine-3'-phosphate
  modified_base 13: mod_base = OTHER; note = 2'-O-methyladenosine-3'-phosphate
  modified_base 14: mod_base = OTHER; note = 2'-fluoroguanosine-3'-phosphate
  modified_base 15: mod_base = OTHER; note = 2'-O-methylguanosine-3'-phosphate
  modified_base 16: mod_base = OTHER; note = 2'-fluorouridine-3'-phosphate
  modified_base 17: mod_base = OTHER; note = 2'-O-methylcytidine-3'-phosphate
  modified_base 18: mod_base = OTHER; note = 2'-fluorouridine-3'-phosphate
  modified_base 19: mod_base = OTHER; note = 2'-O-methyladenosine-3'-phosphate
  modified_base 20: mod_base = OTHER; note = 2'-fluoroguanosine-3'-phosphate
  modified_base 21: mod_base = OTHER; note = 2'-O-methyladenosine-3'-phosphorothioate
  modified_base 22: mod_base = OTHER; note = 2'-fluoroadenosine-3'-phosphorothioate
  modified_base 23: mod_base = OTHER; note = 2'-O-methyladenosine-3'-phosphate
aaaaagcaaaacaggtctagaaa

SEQ ID NO: 399 - RNA, 21 nt, synthetic construct
  source 1..21: mol_type = other RNA; note = Description of Artificial Sequence: Synthetic oligonucleotide
  modified_base 1: mod_base = OTHER; note = 2'-fluorocytidine-3'-phosphorothioate
  modified_base 2: mod_base = OTHER; note = 2'-O-methyluridine-3'-phosphorothioate
  modified_base 3: mod_base = OTHER; note = 2'-fluoroadenosine-3'-phosphate
  modified_base 4: mod_base = OTHER; note = 2'-O-methylguanosine-3'-phosphate
  modified_base 5: mod_base = OTHER; note = 2'-fluoroadenosine-3'-phosphate
  modified_base 6: mod_base = OTHER; note = 2'-O-methylcytidine-3'-phosphate
  modified_base 7: mod_base = OTHER; note = 2'-fluorocytidine-3'-phosphate
  modified_base 8: mod_base = OTHER; note = 2'-O-methyluridine-3'-phosphate
  modified_base 9: mod_base = OTHER; note = 2'-fluoroguanosine-3'-phosphate
  modified_base 10: mod_base = OTHER; note = 2'-fluorouridine-3'-phosphate
  modified_base 11: mod_base = OTHER; note = 2'-fluorouridine-3'-phosphate
  modified_base 12: mod_base = OTHER; note = 2'-O-methyluridine-3'-phosphate
  modified_base 13: mod_base = OTHER; note = 2'-fluorouridine-3'-phosphate
  modified_base 14: mod_base = OTHER; note = 2'-O-methylguanosine-3'-phosphate
  modified_base 15: mod_base = OTHER; note = 2'-fluorocytidine-3'-phosphate
  modified_base 16: mod_base = OTHER; note = 2'-O-methyluridine-3'-phosphate
  modified_base 17: mod_base = OTHER; note = 2'-fluorouridine-3'-phosphate
  modified_base 18: mod_base = OTHER; note = 2'-O-methyluridine-3'-phosphate
  modified_base 19: mod_base = OTHER; note = 2'-fluorouridine-3'-phosphate
  modified_base 20: mod_base = OTHER; note = 2'-O-methylguanosine-3'-phosphate
  modified_base 21: mod_base = OTHER; note = 2'-fluorouridine-3'-phosphate N-[tris(GalNAc-alkyl)-amidodecanoyl)]-4-hydroxyprolinol Hyp-(GalNAc-alkyl)3
ctagacctgttttgcttttgt

SEQ ID NO: 400 - RNA, 22 nt, synthetic construct
  source 1..22: mol_type = other RNA; note = Description of Artificial Sequence: Synthetic oligonucleotide
  modified_base 1: mod_base = OTHER; note = 2'-O-methyladenosine-3'-phosphorothioate
  modified_base 2: mod_base = OTHER; note = 2'-fluorocytidine-3'-phosphorothioate
  modified_base 3: mod_base = OTHER; note = 2'-O-methyladenosine-3'-phosphate
  modified_base 4: mod_base = OTHER; note = 2'-fluoroadenosine-3'-phosphate
  modified_base 5: mod_base = OTHER; note = 2'-O-methyladenosine-3'-phosphate
  modified_base 6: mod_base = OTHER; note = 2'-fluoroadenosine-3'-phosphate
  modified_base 7: mod_base = OTHER; note = 2'-O-methylguanosine-3'-phosphate
  modified_base 8: mod_base = OTHER; note = 2'-fluorocytidine-3'-phosphate
  modified_base 9: mod_base = OTHER; note = 2'-O-methyladenosine-3'-phosphate
  modified_base 10: mod_base = OTHER; note = 2'-fluoroadenosine-3'-phosphate
  modified_base 11: mod_base = OTHER; note = 2'-O-methyladenosine-3'-phosphate
  modified_base 12: mod_base = OTHER; note = 2'-O-methyladenosine-3'-phosphate
  modified_base 13: mod_base = OTHER; note = 2'-O-methylcytidine-3'-phosphate
  modified_base 14: mod_base = OTHER; note = 2'-fluoroadenosine-3'-phosphate
  modified_base 15: mod_base = OTHER; note = 2'-O-methylguanosine-3'-phosphate
  modified_base 16: mod_base = OTHER; note = 2'-fluoroguanosine-3'-phosphate
  modified_base 17: mod_base = OTHER; note = 2'-O-methyluridine-3'-phosphate
  modified_base 18: mod_base = OTHER; note = 2'-fluorocytidine-3'-phosphate
  modified_base 19: mod_base = OTHER; note = 2'-O-methyluridine-3'-phosphate
  modified_base 20: mod_base = OTHER; note = 2'-fluoroadenosine-3'-phosphorothioate
  modified_base 21: mod_base = OTHER; note = 2'-O-methylguanosine-3'-phosphorothioate
  modified_base 22: mod_base = OTHER; note = 2'-O-methyladenosine-3'-phosphate
acaaaagcaaaacaggtctaga

SEQ ID NO: 401 - RNA, 20 nt, synthetic construct
  source 1..20: mol_type = other RNA; note = Description of Artificial Sequence: Synthetic oligonucleotide
  modified_base 1: mod_base = OTHER; note = 2'-O-methyluridine-3'-phosphorothioate
  modified_base 2: mod_base = OTHER; note = 2'-fluoroadenosine-3'-phosphorothioate
  modified_base 3: mod_base = OTHER; note = 2'-O-methylguanosine-3'-phosphate
  modified_base 4: mod_base = OTHER; note = 2'-fluoroadenosine-3'-phosphate
  modified_base 5: mod_base = OTHER; note = 2'-O-methylcytidine-3'-phosphate
  modified_base 6: mod_base = OTHER; note = 2'-fluorocytidine-3'-phosphate
  modified_base 7: mod_base = OTHER; note = 2'-O-methyluridine-3'-phosphate
  modified_base 8: mod_base = OTHER; note = 2'-fluoroguanosine-3'-phosphate
  modified_base 9: mod_base = OTHER; note = 2'-fluorouridine-3'-phosphate
  modified_base 10: mod_base = OTHER; note = 2'-fluorouridine-3'-phosphate
  modified_base 11: mod_base = OTHER; note = 2'-O-methyluridine-3'-phosphate
  modified_base 12: mod_base = OTHER; note = 2'-fluorouridine-3'-phosphate
  modified_base 13: mod_base = OTHER; note = 2'-O-methylguanosine-3'-phosphate
  modified_base 14: mod_base = OTHER; note = 2'-fluorocytidine-3'-phosphate
  modified_base 15: mod_base = OTHER; note = 2'-O-methyluridine-3'-phosphate
  modified_base 16: mod_base = OTHER; note = 2'-fluorouridine-3'-phosphate
  modified_base 17: mod_base = OTHER; note = 2'-O-methyluridine-3'-phosphate
  modified_base 18: mod_base = OTHER; note = 2'-fluorouridine-3'-phosphate
  modified_base 19: mod_base = OTHER; note = 2'-O-methylguanosine-3'-phosphate
  modified_base 20: mod_base = OTHER; note = 2'-fluorouridine-3'-phosphate N-[tris(GalNAc-alkyl)-amidodecanoyl)]-4-hydroxyprolinol Hyp-(GalNAc-alkyl)3
tagacctgttttgcttttgt

SEQ ID NO: 402 - RNA, 22 nt, synthetic construct
  source 1..22: mol_type = other RNA; note = Description of Artificial Sequence: Synthetic oligonucleotide
  modified_base 1: mod_base = OTHER; note = 2'-O-methyladenosine-3'-phosphorothioate
  modified_base 2: mod_base = OTHER; note = 2'-fluorocytidine-3'-phosphorothioate
  modified_base 3: mod_base = OTHER; note = 2'-O-methyladenosine-3'-phosphate
  modified_base 4: mod_base = OTHER; note = 2'-fluoroadenosine-3'-phosphate
  modified_base 5: mod_base = OTHER; note = 2'-O-methyladenosine-3'-phosphate
  modified_base 6: mod_base = OTHER; note = 2'-fluoroadenosine-3'-phosphate
  modified_base 7: mod_base = OTHER; note = 2'-O-methylguanosine-3'-phosphate
  modified_base 8: mod_base = OTHER; note = 2'-fluorocytidine-3'-phosphate
  modified_base 9: mod_base = OTHER; note = 2'-O-methyladenosine-3'-phosphate
  modified_base 10: mod_base = OTHER; note = 2'-fluoroadenosine-3'-phosphate
  modified_base 11: mod_base = OTHER; note = 2'-O-methyladenosine-3'-phosphate
  modified_base 12: mod_base = OTHER; note = 2'-O-methyladenosine-3'-phosphate
  modified_base 13: mod_base = OTHER; note = 2'-O-methylcytidine-3'-phosphate
  modified_base 14: mod_base = OTHER; note = 2'-fluoroadenosine-3'-phosphate
  modified_base 15: mod_base = OTHER; note = 2'-O-methylguanosine-3'-phosphate
  modified_base 16: mod_base = OTHER; note = 2'-fluoroguanosine-3'-phosphate
  modified_base 17: mod_base = OTHER; note = 2'-O-methyluridine-3'-phosphate
  modified_base 18: mod_base = OTHER; note = 2'-fluorocytidine-3'-phosphate
  modified_base 19: mod_base = OTHER; note = 2'-O-methyluridine-3'-phosphate
  modified_base 20: mod_base = OTHER; note = 2'-fluoroadenosine-3'-phosphorothioate
  modified_base 21: mod_base = OTHER; note = 2'-O-methylguanosine-3'-phosphorothioate
  modified_base 22: mod_base = OTHER; note = 2'-O-methyladenosine-3'-phosphate
acaaaagcaaaacaggtctaga

SEQ ID NO: 403 - RNA, 19 nt, synthetic construct
  source 1..19: mol_type = other RNA; note = Description of Artificial Sequence: Synthetic oligonucleotide
  modified_base 1: mod_base = OTHER; note = 2'-fluoroadenosine-3'-phosphorothioate
  modified_base 2: mod_base = OTHER; note = 2'-O-methylguanosine-3'-phosphorothioate
  modified_base 3: mod_base = OTHER; note = 2'-fluoroadenosine-3'-phosphate
  modified_base 4: mod_base = OTHER; note = 2'-O-methylcytidine-3'-phosphate
  modified_base 5: mod_base = OTHER; note = 2'-fluorocytidine-3'-phosphate
  modified_base 6: mod_base = OTHER; note = 2'-O-methyluridine-3'-phosphate
  modified_base 7: mod_base = OTHER; note = 2'-fluoroguanosine-3'-phosphate
  modified_base 8: mod_base = OTHER; note = 2'-fluorouridine-3'-phosphate
  modified_base 9: mod_base = OTHER; note = 2'-fluorouridine-3'-phosphate
  modified_base 10: mod_base = OTHER; note = 2'-O-methyluridine-3'-phosphate
  modified_base 11: mod_base = OTHER; note = 2'-fluorouridine-3'-phosphate
  modified_base 12: mod_base = OTHER; note = 2'-O-methylguanosine-3'-phosphate
  modified_base 13: mod_base = OTHER; note = 2'-fluorocytidine-3'-phosphate
  modified_base 14: mod_base = OTHER; note = 2'-O-methyluridine-3'-phosphate
  modified_base 15: mod_base = OTHER; note = 2'-fluorouridine-3'-phosphate
  modified_base 16: mod_base = OTHER; note = 2'-O-methyluridine-3'-phosphate
  modified_base 17: mod_base = OTHER; note = 2'-fluorouridine-3'-phosphate
  modified_base 18: mod_base = OTHER; note = 2'-O-methylguanosine-3'-phosphate
  modified_base 19: mod_base = OTHER; note = 2'-fluorouridine-3'-phosphate N-[tris(GalNAc-alkyl)-amidodecanoyl)]-4-hydroxyprolinol Hyp-(GalNAc-alkyl)3
agacctgttttgcttttgt

SEQ ID NO: 404 - RNA, 22 nt, synthetic construct
  source 1..22: mol_type = other RNA; note = Description of Artificial Sequence: Synthetic oligonucleotide
  modified_base 1: mod_base = OTHER; note = 2'-O-methyladenosine-3'-phosphorothioate
  modified_base 2: mod_base = OTHER; note = 2'-fluorocytidine-3'-phosphorothioate
  modified_base 3: mod_base = OTHER; note = 2'-O-methyladenosine-3'-phosphate
  modified_base 4: mod_base = OTHER; note = 2'-fluoroadenosine-3'-phosphate
  modified_base 5: mod_base = OTHER; note = 2'-O-methyladenosine-3'-phosphate
  modified_base 6: mod_base = OTHER; note = 2'-fluoroadenosine-3'-phosphate
  modified_base 7: mod_base = OTHER; note = 2'-O-methylguanosine-3'-phosphate
  modified_base 8: mod_base = OTHER; note = 2'-fluorocytidine-3'-phosphate
  modified_base 9: mod_base = OTHER; note = 2'-O-methyladenosine-3'-phosphate
  modified_base 10: mod_base = OTHER; note = 2'-fluoroadenosine-3'-phosphate
  modified_base 11: mod_base = OTHER; note = 2'-O-methyladenosine-3'-phosphate
  modified_base 12: mod_base = OTHER; note = 2'-O-methyladenosine-3'-phosphate
  modified_base 13: mod_base = OTHER; note = 2'-O-methylcytidine-3'-phosphate
  modified_base 14: mod_base = OTHER; note = 2'-fluoroadenosine-3'-phosphate
  modified_base 15: mod_base = OTHER; note = 2'-O-methylguanosine-3'-phosphate
  modified_base 16: mod_base = OTHER; note = 2'-fluoroguanosine-3'-phosphate
  modified_base 17: mod_base = OTHER; note = 2'-O-methyluridine-3'-phosphate
  modified_base 18: mod_base = OTHER; note = 2'-fluorocytidine-3'-phosphate
  modified_base 19: mod_base = OTHER; note = 2'-O-methyluridine-3'-phosphate
  modified_base 20: mod_base = OTHER; note = 2'-fluoroadenosine-3'-phosphorothioate
  modified_base 21: mod_base = OTHER; note = 2'-O-methylguanosine-3'-phosphorothioate
  modified_base 22: mod_base = OTHER; note = 2'-O-methyladenosine-3'-phosphate
acaaaagcaaaacaggtctaga

SEQ ID NO: 405 - RNA, 20 nt, synthetic construct
  source 1..20: mol_type = other RNA; note = Description of Artificial Sequence: Synthetic oligonucleotide
  modified_base 1: mod_base = OTHER; note = 2'-O-methyluridine-3'-phosphorothioate
  modified_base 2: mod_base = OTHER; note = 2'-fluoroadenosine-3'-phosphorothioate
  modified_base 3: mod_base = OTHER; note = 2'-O-methylguanosine-3'-phosphate
  modified_base 4: mod_base = OTHER; note = 2'-fluoroadenosine-3'-phosphate
  modified_base 5: mod_base = OTHER; note = 2'-O-methylcytidine-3'-phosphate
  modified_base 6: mod_base = OTHER; note = 2'-fluorocytidine-3'-phosphate
  modified_base 7: mod_base = OTHER; note = 2'-O-methyluridine-3'-phosphate
  modified_base 8: mod_base = OTHER; note = 2'-fluoroguanosine-3'-phosphate
  modified_base 9: mod_base = OTHER; note = 2'-fluorouridine-3'-phosphate
  modified_base 10: mod_base = OTHER; note = 2'-fluorouridine-3'-phosphate
  modified_base 11: mod_base = OTHER; note = 2'-O-methyluridine-3'-phosphate
  modified_base 12: mod_base = OTHER; note = 2'-fluorouridine-3'-phosphate
  modified_base 13: mod_base = OTHER; note = 2'-O-methylguanosine-3'-phosphate
  modified_base 14: mod_base = OTHER; note = 2'-fluorocytidine-3'-phosphate
  modified_base 15: mod_base = OTHER; note = 2'-O-methyluridine-3'-phosphate
  modified_base 16: mod_base = OTHER; note = 2'-fluorouridine-3'-phosphate
  modified_base 17: mod_base = OTHER; note = 2'-O-methyluridine-3'-phosphate
  modified_base 18: mod_base = OTHER; note = 2'-fluorouridine-3'-phosphate
  modified_base 19: mod_base = OTHER; note = 2'-O-methylguanosine-3'-phosphate
  modified_base 20: mod_base = OTHER; note = 2'-fluorouridine-3'-phosphate N-[tris(GalNAc-alkyl)-amidodecanoyl)]-4-hydroxyprolinol Hyp-(GalNAc-alkyl)3
tagacctgttttgcttttgt

SEQ ID NO: 406 - RNA, 22 nt, synthetic construct
  source 1..22: mol_type = other RNA; note = Description of Artificial Sequence: Synthetic oligonucleotide
  modified_base 1: mod_base = OTHER; note = 2'-O-methyladenosine-3'-phosphorothioate
  modified_base 2: mod_base = OTHER; note = 2'-fluorocytidine-3'-phosphorothioate
  modified_base 3: mod_base = OTHER; note = 2'-O-methyladenosine-3'-phosphate
  modified_base 4: mod_base = OTHER; note = 2'-fluoroadenosine-3'-phosphate
  modified_base 5: mod_base = OTHER; note = 2'-O-methyladenosine-3'-phosphate
  modified_base 6: mod_base = OTHER; note = 2'-fluoroadenosine-3'-phosphate
  modified_base 7: mod_base = OTHER; note = 2'-O-methylguanosine-3'-phosphate
  modified_base 8: mod_base = OTHER; note = 2'-fluorocytidine-3'-phosphate
  modified_base 9: mod_base = OTHER; note = 2'-O-methyladenosine-3'-phosphate
  modified_base 10: mod_base = OTHER; note = 2'-fluoroadenosine-3'-phosphate
  modified_base 11: mod_base = OTHER; note = 2'-O-methyladenosine-3'-phosphate
  modified_base 12: mod_base = OTHER; note = 2'-O-methyladenosine-3'-phosphate
  modified_base 13: mod_base = OTHER; note = 2'-O-methylcytidine-3'-phosphate
  modified_base 14: mod_base = OTHER; note = 2'-fluoroadenosine-3'-phosphate
  modified_base 15: mod_base = OTHER; note = 2'-O-methylguanosine-3'-phosphate
  modified_base 16: mod_base = OTHER; note = 2'-fluoroguanosine-3'-phosphate
  modified_base 17: mod_base = OTHER; note = 2'-O-methyluridine-3'-phosphate
  modified_base 18: mod_base = OTHER; note = 2'-fluorocytidine-3'-phosphate
  modified_base 19: mod_base = OTHER; note = 2'-O-methyluridine-3'-phosphate
  modified_base 20: mod_base = OTHER; note = 2'-fluoroadenosine-3'-phosphorothioate
  modified_base 21: mod_base = OTHER; note = 2'-O-methylguanosine-3'-phosphorothioate
  modified_base 22: mod_base = OTHER; note = 2'-O-methyladenosine-3'-phosphate
acaaaagcaaaacaggtctaga

SEQ ID NO: 407 - RNA, 20 nt, synthetic construct
  source 1..20: mol_type = other RNA; note = Description of Artificial Sequence: Synthetic oligonucleotide
  modified_base 1: mod_base = OTHER; note = 2'-O-methyluridine-3'-phosphorothioate
  modified_base 2: mod_base = OTHER; note = 2'-O-methyladenosine-3'-phosphorothioate
  modified_base 3: mod_base = OTHER; note = 2'-O-methylguanosine-3'-phosphate
  modified_base 4: mod_base = OTHER; note = 2'-fluoroadenosine-3'-phosphate
  modified_base 5: mod_base = OTHER; note = 2'-O-methylcytidine-3'-phosphate
  modified_base 6: mod_base = OTHER; note = 2'-fluorocytidine-3'-phosphate
  modified_base 7: mod_base = OTHER; note = 2'-O-methyluridine-3'-phosphate
  modified_base 8: mod_base = OTHER; note = 2'-fluoroguanosine-3'-phosphate
  modified_base 9: mod_base = OTHER; note = 2'-fluorouridine-3'-phosphate
  modified_base 10: mod_base = OTHER; note = 2'-fluorouridine-3'-phosphate
  modified_base 11: mod_base = OTHER; note = 2'-O-methyluridine-3'-phosphate
  modified_base 12: mod_base = OTHER; note = 2'-fluorouridine-3'-phosphate
  modified_base 13: mod_base = OTHER; note = 2'-O-methylguanosine-3'-phosphate
  modified_base 14: mod_base = OTHER; note = 2'-fluorocytidine-3'-phosphate
  modified_base 15: mod_base = OTHER; note = 2'-O-methyluridine-3'-phosphate
  modified_base 16: mod_base = OTHER; note = 2'-fluorouridine-3'-phosphate
  modified_base 17: mod_base = OTHER; note = 2'-O-methyluridine-3'-phosphate
  modified_base 18: mod_base = OTHER; note = 2'-fluorouridine-3'-phosphate
  modified_base 19: mod_base = OTHER; note = 2'-O-methylguanosine-3'-phosphate
  modified_base 20: mod_base = OTHER; note = 2'-fluorouridine-3'-phosphate N-[tris(GalNAc-alkyl)-amidodecanoyl)]-4-hydroxyprolinol Hyp-(GalNAc-alkyl)3
tagacctgttttgcttttgt

SEQ ID NO: 408 - RNA, 22 nt, synthetic construct
  source 1..22: mol_type = other RNA; note = Description of Artificial Sequence: Synthetic oligonucleotide
  modified_base 1: mod_base = OTHER; note = 2'-O-methyladenosine-3'-phosphorothioate
  modified_base 2: mod_base = OTHER; note = 2'-fluorocytidine-3'-phosphorothioate
  modified_base 3: mod_base = OTHER; note = 2'-O-methyladenosine-3'-phosphate
  modified_base 4: mod_base = OTHER; note = 2'-fluoroadenosine-3'-phosphate
  modified_base 5: mod_base = OTHER; note = 2'-O-methyladenosine-3'-phosphate
  modified_base 6: mod_base = OTHER; note = 2'-fluoroadenosine-3'-phosphate
  modified_base 7: mod_base = OTHER; note = 2'-O-methylguanosine-3'-phosphate
  modified_base 8: mod_base = OTHER; note = 2'-fluorocytidine-3'-phosphate
  modified_base 9: mod_base = OTHER; note = 2'-O-methyladenosine-3'-phosphate
  modified_base 10: mod_base = OTHER; note = 2'-fluoroadenosine-3'-phosphate
  modified_base 11: mod_base = OTHER; note = 2'-O-methyladenosine-3'-phosphate
  modified_base 12: mod_base = OTHER; note = 2'-O-methyladenosine-3'-phosphate
  modified_base 13: mod_base = OTHER; note = 2'-O-methylcytidine-3'-phosphate
  modified_base 14: mod_base = OTHER; note = 2'-fluoroadenosine-3'-phosphate
  modified_base 15: mod_base = OTHER; note = 2'-O-methylguanosine-3'-phosphate
  modified_base 16: mod_base = OTHER; note = 2'-fluoroguanosine-3'-phosphate
  modified_base 17: mod_base = OTHER; note = 2'-O-methyluridine-3'-phosphate
  modified_base 18: mod_base = OTHER; note = 2'-fluorocytidine-3'-phosphate
  modified_base 19: mod_base = OTHER; note = 2'-O-methyluridine-3'-phosphate
  modified_base 20: mod_base = OTHER; note = 2'-fluoroadenosine-3'-phosphorothioate
  modified_base 21: mod_base = OTHER; note = 2'-O-methylguanosine-3'-phosphorothioate
  modified_base 22: mod_base = OTHER; note = 2'-O-methyladenosine-3'-phosphate
acaaaagcaaaacaggtctaga

SEQ ID NO: 409 - RNA, 21 nt, synthetic construct
  source 1..21: mol_type = other RNA; note = Description of Artificial Sequence: Synthetic oligonucleotide
  modified_base 1: mod_base = OTHER; note = 2'-fluorocytidine-3'-phosphate
  modified_base 2: mod_base = OTHER; note = 2'-O-methyluridine-3'-phosphate
  modified_base 3: mod_base = OTHER; note = 2'-fluoroadenosine-3'-phosphate
  modified_base 4: mod_base = OTHER; note = 2'-O-methylguanosine-3'-phosphate
  modified_base 5: mod_base = OTHER; note = 2'-fluoroadenosine-3'-phosphate
  modified_base 6: mod_base = OTHER; note = 2'-O-methylcytidine-3'-phosphate
  modified_base 7: mod_base = OTHER; note = 2'-fluorocytidine-3'-phosphate
  modified_base 8: mod_base = OTHER; note = 2'-O-methyluridine-3'-phosphate
  modified_base 9: mod_base = OTHER; note = 2'-fluoroguanosine-3'-phosphate
  modified_base 10: mod_base = OTHER; note = 2'-fluorouridine-3'-phosphate
  modified_base 11: mod_base = OTHER; note = 2'-fluorouridine-3'-phosphate
  modified_base 12: mod_base = OTHER; note = 2'-O-methyluridine-3'-phosphate
  modified_base 13: mod_base = OTHER; note = 2'-fluorouridine-3'-phosphate
  modified_base 14: mod_base = OTHER; note = 2'-O-methylguanosine-3'-phosphate
  modified_base 15: mod_base = OTHER; note = 2'-fluorocytidine-3'-phosphate
  modified_base 16: mod_base = OTHER; note = 2'-O-methyluridine-3'-phosphate
  modified_base 17: mod_base = OTHER; note = 2'-fluorouridine-3'-phosphate
  modified_base 18: mod_base = OTHER; note = 2'-O-methyluridine-3'-phosphate
  modified_base 19: mod_base = OTHER; note = 2'-fluorouridine-3'-phosphate
  modified_base 20: mod_base = OTHER; note = 2'-O-methylguanosine-3'-phosphate
  modified_base 21: mod_base = OTHER; note = 2'-fluorouridine-3'-phosphate N-[tris(GalNAc-alkyl)-amidodecanoyl)]-4-hydroxyprolinol Hyp-(GalNAc-alkyl)3
ctagacctgttttgcttttgt

SEQ ID NO: 410 - RNA, 23 nt, synthetic construct
  source 1..23: mol_type = other RNA; note = Description of Artificial Sequence: Synthetic oligonucleotide
  modified_base 1: mod_base = OTHER; note = 2'-O-methyladenosine-3'-phosphate
  modified_base 2: mod_base = OTHER; note = 2'-fluorocytidine-3'-phosphate
  modified_base 3: mod_base = OTHER; note = 2'-O-methyladenosine-3'-phosphate
  modified_base 4: mod_base = OTHER; note = 2'-fluoroadenosine-3'-phosphate
  modified_base 5: mod_base = OTHER; note = 2'-O-methyladenosine-3'-phosphate
  modified_base 6: mod_base = OTHER; note = 2'-fluoroadenosine-3'-phosphate
  modified_base 7: mod_base = OTHER; note = 2'-O-methylguanosine-3'-phosphate
  modified_base 8: mod_base = OTHER; note = 2'-fluorocytidine-3'-phosphate
  modified_base 9: mod_base = OTHER; note = 2'-O-methyladenosine-3'-phosphate
  modified_base 10: mod_base = OTHER; note = 2'-fluoroadenosine-3'-phosphate
  modified_base 11: mod_base = OTHER; note = 2'-O-methyladenosine-3'-phosphate
  modified_base 12: mod_base = OTHER; note = 2'-O-methyladenosine-3'-phosphate
  modified_base 13: mod_base = OTHER; note = 2'-O-methylcytidine-3'-phosphate
  modified_base 14: mod_base = OTHER; note = 2'-fluoroadenosine-3'-phosphate
  modified_base 15: mod_base = OTHER; note = 2'-O-methylguanosine-3'-phosphate
  modified_base 16: mod_base = OTHER; note = 2'-fluoroguanosine-3'-phosphate
  modified_base 17: mod_base = OTHER; note = 2'-O-methyluridine-3'-phosphate
  modified_base 18: mod_base = OTHER; note = 2'-fluorocytidine-3'-phosphate
  modified_base 19: mod_base = OTHER; note = 2'-O-methyluridine-3'-phosphate
  modified_base 20: mod_base = OTHER; note = 2'-fluoroadenosine-3'-phosphate
  modified_base 21: mod_base = OTHER; note = 2'-O-methylguanosine-3'-phosphorothioate
  modified_base 22: mod_base = OTHER; note = 2'-fluoroadenosine-3'-phosphorothioate
  modified_base 23: mod_base = OTHER; note = 2'-O-methyladenosine-3'-phosphate
acaaaagcaaaacaggtctagaa

SEQ ID NO: 411 - RNA, 21 nt, synthetic construct
  source 1..21: mol_type = other RNA; note = Description of Artificial Sequence: Synthetic oligonucleotide
  modified_base 1: mod_base = OTHER; note = 2'-fluorocytidine-3'-phosphate
  modified_base 2: mod_base = OTHER; note = 2'-O-methyluridine-3'-phosphate
  modified_base 3: mod_base = OTHER; note = 2'-fluoroadenosine-3'-phosphate
  modified_base 4: mod_base = OTHER; note = 2'-O-methylguanosine-3'-phosphate
  modified_base 5: mod_base = OTHER; note = 2'-fluoroadenosine-3'-phosphate
  modified_base 6: mod_base = OTHER; note = 2'-O-methylcytidine-3'-phosphate
  modified_base 7: mod_base = OTHER; note = 2'-fluorocytidine-3'-phosphate
  modified_base 8: mod_base = OTHER; note = 2'-O-methyluridine-3'-phosphate
  modified_base 9: mod_base = OTHER; note = 2'-fluoroguanosine-3'-phosphate
  modified_base 10: mod_base = OTHER; note = 2'-fluorouridine-3'-phosphate
  modified_base 11: mod_base = OTHER; note = 2'-fluorouridine-3'-phosphate
  modified_base 12: mod_base = OTHER; note = 2'-O-methyluridine-3'-phosphate
  modified_base 13: mod_base = OTHER; note = 2'-fluorouridine-3'-phosphate
  modified_base 14: mod_base = OTHER; note = 2'-O-methylguanosine-3'-phosphate
  modified_base 15: mod_base = OTHER; note = 2'-fluorocytidine-3'-phosphate
  modified_base 16: mod_base = OTHER; note = 2'-O-methyluridine-3'-phosphate
  modified_base 17: mod_base = OTHER; note = 2'-fluorouridine-3'-phosphate
  modified_base 18: mod_base = OTHER; note = 2'-O-methyluridine-3'-phosphate
  modified_base 19: mod_base = OTHER; note = 2'-fluorouridine-3'-phosphate
  modified_base 20: mod_base = OTHER; note = 2'-O-methylguanosine-3'-phosphate
  modified_base 21: mod_base = OTHER; note = 2'-fluorouridine-3'-phosphate N-[tris(GalNAc-alkyl)-amidodecanoyl)]-4-hydroxyprolinol Hyp-(GalNAc-alkyl)3
ctagacctgttttgcttttgt

SEQ ID NO: 412 - RNA, 23 nt, synthetic construct
  source 1..23: mol_type = other RNA; note = Description of Artificial Sequence: Synthetic oligonucleotide
  modified_base 1: mod_base = OTHER; note = 2'-O-methyladenosine-3'-phosphate
  modified_base 2: mod_base = OTHER; note = 2'-fluorocytidine-3'-phosphate
  modified_base 3: mod_base = OTHER; note = 2'-O-methyladenosine-3'-phosphate
  modified_base 4: mod_base = OTHER; note = 2'-fluoroadenosine-3'-phosphate
  modified_base 5: mod_base = OTHER; note = 2'-O-methyladenosine-3'-phosphate
  modified_base 6: mod_base = OTHER; note = 2'-fluoroadenosine-3'-phosphate
  modified_base 7: mod_base = OTHER; note = 2'-O-methylguanosine-3'-phosphate
  modified_base 8: mod_base = OTHER; note = 2'-fluorocytidine-3'-phosphate
  modified_base 9: mod_base = OTHER; note = 2'-O-methyladenosine-3'-phosphate
  modified_base 10: mod_base = OTHER; note = 2'-fluoroadenosine-3'-phosphate
  modified_base 11: mod_base = OTHER; note = 2'-O-methyladenosine-3'-phosphate
  modified_base 12: mod_base = OTHER; note = 2'-O-methyladenosine-3'-phosphate
  modified_base 13: mod_base = OTHER; note = 2'-O-methylcytidine-3'-phosphate
  modified_base 14: mod_base = OTHER; note = 2'-fluoroadenosine-3'-phosphate
  modified_base 15: mod_base = OTHER; note = 2'-O-methylguanosine-3'-phosphate
  modified_base 16: mod_base = OTHER; note = 2'-fluoroguanosine-3'-phosphate
  modified_base 17: mod_base = OTHER; note = 2'-O-methyluridine-3'-phosphate
  modified_base 18: mod_base = OTHER; note = 2'-fluorocytidine-3'-phosphate
  modified_base 19: mod_base = OTHER; note = 2'-O-methyluridine-3'-phosphate
  modified_base 20: mod_base = OTHER; note = 2'-fluoroadenosine-3'-phosphate
  modified_base 21: mod_base = OTHER; note = 2'-O-methylguanosine-3'-phosphorothioate
  modified_base 22: mod_base = OTHER; note = 2'-fluoroadenosine-3'-phosphorothioate
  modified_base 23: mod_base = OTHER; note = 2'-O-methyladenosine-3'-phosphate
acaaaagcaaaacaggtctagaa

SEQ ID NO: 413 - RNA, 21 nt, synthetic construct
  source 1..21: mol_type = other RNA; note = Description of Artificial Sequence: Synthetic oligonucleotide
  modified_base 1: mod_base = OTHER; note = 2'-fluorocytidine-3'-phosphate
  modified_base 2: mod_base = OTHER; note = 2'-O-methyluridine-3'-phosphate
  modified_base 3: mod_base = OTHER; note = 2'-fluoroadenosine-3'-phosphate
  modified_base 4: mod_base = OTHER; note = 2'-O-methylguanosine-3'-phosphate
  modified_base 5: mod_base = OTHER; note = 2'-fluoroadenosine-3'-phosphate
  modified_base 6: mod_base = OTHER; note = 2'-O-methylcytidine-3'-phosphate
  modified_base 7: mod_base = OTHER; note = 2'-fluorocytidine-3'-phosphate
  modified_base 8: mod_base = OTHER; note = 2'-O-methyluridine-3'-phosphate
  modified_base 9: mod_base = OTHER; note = 2'-fluoroguanosine-3'-phosphate
  modified_base 10: mod_base = OTHER; note = 2'-fluorouridine-3'-phosphate
  modified_base 11: mod_base = OTHER; note = 2'-fluorouridine-3'-phosphate
  modified_base 12: mod_base = OTHER; note = 2'-O-methyluridine-3'-phosphate
  modified_base 13: mod_base = OTHER; note = 2'-fluorouridine-3'-phosphate
  modified_base 14: mod_base = OTHER; note = 2'-O-methylguanosine-3'-phosphate
  modified_base 15: mod_base = OTHER; note = 2'-fluorocytidine-3'-phosphate
  modified_base 16: mod_base = OTHER; note = 2'-O-methyluridine-3'-phosphate
  modified_base 17: mod_base = OTHER; note = 2'-fluorouridine-3'-phosphate
  modified_base 18: mod_base = OTHER; note = 2'-O-methyluridine-3'-phosphate
  modified_base 19: mod_base = OTHER; note = 2'-fluorouridine-3'-phosphate
  modified_base 20: mod_base = OTHER; note = 2'-O-methylguanosine-3'-phosphate
  modified_base 21: mod_base = OTHER; note = 2'-fluorouridine-3'-phosphate N-[tris(GalNAc-alkyl)-amidodecanoyl)]-4-hydroxyprolinol Hyp-(GalNAc-alkyl)3
ctagacctgttttgcttttgt

SEQ ID NO: 414 - RNA, 23 nt, synthetic construct
  source 1..23: mol_type = other RNA; note = Description of Artificial Sequence: Synthetic oligonucleotide
  modified_base 1: mod_base = OTHER; note = 2'-O-methyladenosine-3'-phosphate
  modified_base 2: mod_base = OTHER; note = 2'-fluorocytidine-3'-phosphate
  modified_base 3: mod_base = OTHER; note = 2'-O-methyladenosine-3'-phosphate
  modified_base 4: mod_base = OTHER; note = 2'-fluoroadenosine-3'-phosphate
  modified_base 5: mod_base = OTHER; note = 2'-O-methyladenosine-3'-phosphate
  modified_base 6: mod_base = OTHER; note = 2'-fluoroadenosine-3'-phosphate
  modified_base 7: mod_base = OTHER; note = 2'-O-methylguanosine-3'-phosphate
  modified_base 8: mod_base = OTHER; note = 2'-fluorocytidine-3'-phosphate
  modified_base 9: mod_base = OTHER; note = 2'-O-methyladenosine-3'-phosphate
  modified_base 10: mod_base = OTHER; note = 2'-fluoroadenosine-3'-phosphate
  modified_base 11: mod_base = OTHER; note = 2'-O-methyladenosine-3'-phosphate
  modified_base 12: mod_base = OTHER; note = 2'-O-methyladenosine-3'-phosphate
  modified_base 13: mod_base = OTHER; note = 2'-O-methylcytidine-3'-phosphate
  modified_base 14: mod_base = OTHER; note = 2'-fluoroadenosine-3'-phosphate
  modified_base 15: mod_base = OTHER; note = 2'-O-methylguanosine-3'-phosphate
  modified_base 16: mod_base = OTHER; note = 2'-fluoroguanosine-3'-phosphate
  modified_base 17: mod_base = OTHER; note = 2'-O-methyluridine-3'-phosphate
  modified_base 18: mod_base = OTHER; note = 2'-fluorocytidine-3'-phosphate
  modified_base 19: mod_base = OTHER; note = 2'-O-methyluridine-3'-phosphate
  modified_base 20: mod_base = OTHER; note = 2'-fluoroadenosine-3'-phosphate
  modified_base 21: mod_base = OTHER; note = 2'-O-methylguanosine-3'-phosphorothioate
  modified_base 22: mod_base = OTHER; note = 2'-fluoroadenosine-3'-phosphorothioate
  modified_base 23: mod_base = OTHER; note = 2'-O-methyladenosine-3'-phosphate
acaaaagcaaaacaggtctagaa

SEQ ID NO: 415 - RNA, 21 nt, synthetic construct
  source 1..21: mol_type = other RNA; note = Description of Artificial Sequence: Synthetic oligonucleotide
  modified_base 1: mod_base = OTHER; note = 2'-O-methylcytidine-3'-phosphate
  modified_base 2: mod_base = OTHER; note = 2'-O-methyluridine-3'-phosphate
  modified_base 3: mod_base = OTHER; note = 2'-fluoroadenosine-3'-phosphate
  modified_base 4: mod_base = OTHER; note = 2'-O-methylguanosine-3'-phosphate
  modified_base 5: mod_base = OTHER; note = 2'-fluoroadenosine-3'-phosphate
  modified_base 6: mod_base = OTHER; note = 2'-O-methylcytidine-3'-phosphate
  modified_base 7: mod_base = OTHER; note = 2'-fluorocytidine-3'-phosphate
  modified_base 8: mod_base = OTHER; note = 2'-O-methyluridine-3'-phosphate
  modified_base 9: mod_base = OTHER; note = 2'-fluoroguanosine-3'-phosphate
  modified_base 10: mod_base = OTHER; note = 2'-fluorouridine-3'-phosphate
  modified_base 11: mod_base = OTHER; note = 2'-fluorouridine-3'-phosphate
  modified_base 12: mod_base = OTHER; note = 2'-O-methyluridine-3'-phosphate
  modified_base 13: mod_base = OTHER; note = 2'-fluorouridine-3'-phosphate
  modified_base 14: mod_base = OTHER; note = 2'-O-methylguanosine-3'-phosphate
  modified_base 15: mod_base = OTHER; note = 2'-fluorocytidine-3'-phosphate
  modified_base 16: mod_base = OTHER; note = 2'-O-methyluridine-3'-phosphate
  modified_base 17: mod_base = OTHER; note = 2'-fluorouridine-3'-phosphate
  modified_base 18: mod_base = OTHER; note = 2'-O-methyluridine-3'-phosphate
  modified_base 19: mod_base = OTHER; note = 2'-fluorouridine-3'-phosphate
  modified_base 20: mod_base = OTHER; note = 2'-O-methylguanosine-3'-phosphate
  modified_base 21: mod_base = OTHER; note = 2'-fluorouridine-3'-phosphate N-[tris(GalNAc-alkyl)-amidodecanoyl)]-4-hydroxyprolinol Hyp-(GalNAc-alkyl)3
ctagacctgttttgcttttgt

SEQ ID NO: 416 - RNA, 23 nt, synthetic construct
  source 1..23: mol_type = other RNA; note = Description of Artificial Sequence: Synthetic oligonucleotide
  modified_base 1: mod_base = OTHER; note = 2'-O-methyladenosine-3'-phosphate
  modified_base 2: mod_base = OTHER; note = 2'-fluorocytidine-3'-phosphate
  modified_base 3: mod_base = OTHER; note = 2'-O-methyladenosine-3'-phosphate
  modified_base 4: mod_base = OTHER; note = 2'-fluoroadenosine-3'-phosphate
  modified_base 5: mod_base = OTHER; note = 2'-O-methyladenosine-3'-phosphate
  modified_base 6: mod_base = OTHER; note = 2'-fluoroadenosine-3'-phosphate
  modified_base 7: mod_base = OTHER; note = 2'-O-methylguanosine-3'-phosphate
  modified_base 8: mod_base = OTHER; note = 2'-fluorocytidine-3'-phosphate
  modified_base 9: mod_base = OTHER; note = 2'-O-methyladenosine-3'-phosphate
  modified_base 10: mod_base = OTHER; note = 2'-fluoroadenosine-3'-phosphate
  modified_base 11: mod_base = OTHER; note = 2'-O-methyladenosine-3'-phosphate
  modified_base 12: mod_base = OTHER; note = 2'-O-methyladenosine-3'-phosphate
  modified_base 13: mod_base = OTHER; note = 2'-O-methylcytidine-3'-phosphate
  modified_base 14: mod_base = OTHER; note = 2'-fluoroadenosine-3'-phosphate
  modified_base 15: mod_base = OTHER; note = 2'-O-methylguanosine-3'-phosphate
  modified_base 16: mod_base = OTHER; note = 2'-fluoroguanosine-3'-phosphate
  modified_base 17: mod_base = OTHER; note = 2'-O-methyluridine-3'-phosphate
  modified_base 18: mod_base = OTHER; note = 2'-fluorocytidine-3'-phosphate
  modified_base 19: mod_base = OTHER; note = 2'-O-methyluridine-3'-phosphate
  modified_base 20: mod_base = OTHER; note = 2'-fluoroadenosine-3'-phosphate
  modified_base 21: mod_base = OTHER; note = 2'-O-methylguanosine-3'-phosphorothioate
  modified_base 22: mod_base = OTHER; note = 2'-fluoroadenosine-3'-phosphorothioate
  modified_base 23: mod_base = OTHER; note = 2'-O-methyladenosine-3'-phosphate
acaaaagcaaaacaggtctagaa

SEQ ID NO: 417 - RNA, 21 nt, synthetic construct
  source 1..21: mol_type = other RNA; note = Description of Artificial Sequence: Synthetic oligonucleotide
  modified_base 1: mod_base = OTHER; note = 2'-fluorocytidine-3'-phosphate
  modified_base 2: mod_base = OTHER; note = 2'-O-methyluridine-3'-phosphate
  modified_base 3: mod_base = OTHER; note = 2'-O-methyladenosine-3'-phosphate
  modified_base 4: mod_base = OTHER; note = 2'-O-methylguanosine-3'-phosphate
  modified_base 5: mod_base = OTHER; note = 2'-fluoroadenosine-3'-phosphate
  modified_base 6: mod_base = OTHER; note = 2'-O-methylcytidine-3'-phosphate
  modified_base 7: mod_base = OTHER; note = 2'-fluorocytidine-3'-phosphate
  modified_base 8: mod_base = OTHER; note = 2'-O-methyluridine-3'-phosphate
  modified_base 9: mod_base = OTHER; note = 2'-fluoroguanosine-3'-phosphate
  modified_base 10: mod_base = OTHER; note = 2'-fluorouridine-3'-phosphate
  modified_base 11: mod_base = OTHER; note = 2'-fluorouridine-3'-phosphate
  modified_base 12: mod_base = OTHER; note = 2'-O-methyluridine-3'-phosphate
  modified_base 13: mod_base = OTHER; note = 2'-fluorouridine-3'-phosphate
  modified_base 14: mod_base = OTHER; note = 2'-O-methylguanosine-3'-phosphate
  modified_base 15: mod_base = OTHER; note = 2'-fluorocytidine-3'-phosphate
  modified_base 16: mod_base = OTHER; note = 2'-O-methyluridine-3'-phosphate
  modified_base 17: mod_base = OTHER; note = 2'-fluorouridine-3'-phosphate
  modified_base 18: mod_base = OTHER; note = 2'-O-methyluridine-3'-phosphate
  modified_base 19: mod_base = OTHER; note = 2'-fluorouridine-3'-phosphate
  modified_base 20: mod_base = OTHER; note = 2'-O-methylguanosine-3'-phosphate
  modified_base 21: mod_base = OTHER; note = 2'-fluorouridine-3'-phosphate N-[tris(GalNAc-alkyl)-amidodecanoyl)]-4-hydroxyprolinol Hyp-(GalNAc-alkyl)3
ctagacctgttttgcttttgt

SEQ ID NO: 418 - RNA, 23 nt, synthetic construct
  source 1..23: mol_type = other RNA; note = Description of Artificial Sequence: Synthetic oligonucleotide
  modified_base 1: mod_base = OTHER; note = 2'-O-methyladenosine-3'-phosphate
  modified_base 2: mod_base = OTHER; note = 2'-fluorocytidine-3'-phosphate
  modified_base 3: mod_base = OTHER; note = 2'-O-methyladenosine-3'-phosphate
  modified_base 4: mod_base = OTHER; note = 2'-fluoroadenosine-3'-phosphate
  modified_base 5: mod_base = OTHER; note = 2'-O-methyladenosine-3'-phosphate
  modified_base 6: mod_base = OTHER; note = 2'-fluoroadenosine-3'-phosphate
  modified_base 7: mod_base = OTHER; note = 2'-O-methylguanosine-3'-phosphate
  modified_base 8: mod_base = OTHER; note = 2'-fluorocytidine-3'-phosphate
  modified_base 9: mod_base = OTHER; note = 2'-O-methyladenosine-3'-phosphate
  modified_base 10: mod_base = OTHER; note = 2'-fluoroadenosine-3'-phosphate
  modified_base 11: mod_base = OTHER; note = 2'-O-methyladenosine-3'-phosphate
  modified_base 12: mod_base = OTHER; note = 2'-O-methyladenosine-3'-phosphate
  modified_base 13: mod_base = OTHER; note = 2'-O-methylcytidine-3'-phosphate
  modified_base 14: mod_base = OTHER; note = 2'-fluoroadenosine-3'-phosphate
  modified_base 15: mod_base = OTHER; note = 2'-O-methylguanosine-3'-phosphate
  modified_base 16: mod_base = OTHER; note = 2'-fluoroguanosine-3'-phosphate
  modified_base 17: mod_base = OTHER; note = 2'-O-methyluridine-3'-phosphate
  modified_base 18: mod_base = OTHER; note = 2'-fluorocytidine-3'-phosphate
  modified_base 19: mod_base = OTHER; note = 2'-O-methyluridine-3'-phosphate
  modified_base 20: mod_base = OTHER; note = 2'-fluoroadenosine-3'-phosphate
  modified_base 21: mod_base = OTHER; note = 2'-O-methylguanosine-3'-phosphorothioate
  modified_base 22: mod_base = OTHER; note = 2'-fluoroadenosine-3'-phosphorothioate
  modified_base 23: mod_base = OTHER; note = 2'-O-methyladenosine-3'-phosphate
acaaaagcaaaacaggtctagaa

SEQ ID NO: 419 - RNA, 21 nt, synthetic construct
  source 1..21: mol_type = other RNA; note = Description of Artificial Sequence: Synthetic oligonucleotide
  modified_base 1: mod_base = OTHER; note = 2'-fluorocytidine-3'-phosphate
  modified_base 2: mod_base = OTHER; note = 2'-O-methyluridine-3'-phosphate
  modified_base 3: mod_base = OTHER; note = 2'-O-methyladenosine-3'-phosphate
  modified_base 4: mod_base = OTHER; note = 2'-O-methylguanosine-3'-phosphate
  modified_base 5: mod_base = OTHER; note = 2'-fluoroadenosine-3'-phosphate
  modified_base 6: mod_base = OTHER; note = 2'-O-methylcytidine-3'-phosphate
  modified_base 7: mod_base = OTHER; note = 2'-fluorocytidine-3'-phosphate
  modified_base 8: mod_base = OTHER; note = 2'-O-methyluridine-3'-phosphate
  modified_base 9: mod_base = OTHER; note = 2'-fluoroguanosine-3'-phosphate
  modified_base 10: mod_base = OTHER; note = 2'-fluorouridine-3'-phosphate
  modified_base 11: mod_base = OTHER; note = 2'-fluorouridine-3'-phosphate
  modified_base 12: mod_base = OTHER; note = 2'-O-methyluridine-3'-phosphate
  modified_base 13: mod_base = OTHER; note = 2'-fluorouridine-3'-phosphate
  modified_base 14: mod_base = OTHER; note = 2'-O-methylguanosine-3'-phosphate
  modified_base 15: mod_base = OTHER; note = 2'-O-methylcytidine-3'-phosphate
  modified_base 16: mod_base = OTHER; note = 2'-O-methyluridine-3'-phosphate
  modified_base 17: mod_base = OTHER; note = 2'-fluorouridine-3'-phosphate
  modified_base 18: mod_base = OTHER; note = 2'-O-methyluridine-3'-phosphate
  modified_base 19: mod_base = OTHER; note = 2'-fluorouridine-3'-phosphate
  modified_base 20: mod_base = OTHER; note = 2'-O-methylguanosine-3'-phosphate
  modified_base 21: mod_base = OTHER; note = 2'-O-methyluridine-3'-phosphate N-[tris(GalNAc-alkyl)-amidodecanoyl)]-4-hydroxyprolinol Hyp-(GalNAc-alkyl)3
ctagacctgttttgcttttgt

SEQ ID NO: 420 - RNA, 23 nt, synthetic construct
  source 1..23: mol_type = other RNA; note = Description of Artificial Sequence: Synthetic oligonucleotide
  modified_base 1: mod_base = OTHER; note = 2'-O-methyladenosine-3'-phosphate
  modified_base 2: mod_base = OTHER; note = 2'-fluorocytidine-3'-phosphate
  modified_base 3: mod_base = OTHER; note = 2'-O-methyladenosine-3'-phosphate
  modified_base 4: mod_base = OTHER; note = 2'-fluoroadenosine-3'-phosphate
  modified_base 5: mod_base = OTHER; note = 2'-O-methyladenosine-3'-phosphate
  modified_base 6: mod_base = OTHER; note = 2'-fluoroadenosine-3'-phosphate
  modified_base 7: mod_base = OTHER; note = 2'-O-methylguanosine-3'-phosphate
  modified_base 8: mod_base = OTHER; note = 2'-fluorocytidine-3'-phosphate
  modified_base 9: mod_base = OTHER; note = 2'-O-methyladenosine-3'-phosphate
  modified_base 10: mod_base = OTHER; note = 2'-fluoroadenosine-3'-phosphate
  modified_base 11: mod_base = OTHER; note = 2'-O-methyladenosine-3'-phosphate
  modified_base 12: mod_base = OTHER; note = 2'-O-methyladenosine-3'-phosphate
  modified_base 13: mod_base = OTHER; note = 2'-O-methylcytidine-3'-phosphate
  modified_base 14: mod_base = OTHER; note = 2'-fluoroadenosine-3'-phosphate
  modified_base 15: mod_base = OTHER; note = 2'-O-methylguanosine-3'-phosphate
  modified_base 16: mod_base = OTHER; note = 2'-fluoroguanosine-3'-phosphate
  modified_base 17: mod_base = OTHER; note = 2'-O-methyluridine-3'-phosphate
  modified_base 18: mod_base = OTHER; note = 2'-fluorocytidine-3'-phosphate
  modified_base 19: mod_base = OTHER; note = 2'-O-methyluridine-3'-phosphate
  modified_base 20: mod_base = OTHER; note = 2'-fluoroadenosine-3'-phosphate
  modified_base 21: mod_base = OTHER; note = 2'-O-methylguanosine-3'-phosphorothioate
  modified_base 22: mod_base = OTHER; note = 2'-fluoroadenosine-3'-phosphorothioate
  modified_base 23: mod_base = OTHER; note = 2'-O-methyladenosine-3'-phosphate
acaaaagcaaaacaggtctagaa

SEQ ID NO: 421 - RNA, 21 nt, synthetic construct
  source 1..21: mol_type = other RNA; note = Description of Artificial Sequence: Synthetic oligonucleotide
  modified_base 1: mod_base = OTHER; note = 2'-fluorocytidine-3'-phosphate
  modified_base 2: mod_base = OTHER; note = 2'-O-methyluridine-3'-phosphate
  modified_base 3: mod_base = OTHER; note = 2'-O-methyladenosine-3'-phosphate
  modified_base 4: mod_base = OTHER; note = 2'-O-methylguanosine-3'-phosphate
  modified_base 5: mod_base = OTHER; note = 2'-fluoroadenosine-3'-phosphate
  modified_base 6: mod_base = OTHER; note = 2'-O-methylcytidine-3'-phosphate
  modified_base 7: mod_base = OTHER; note = 2'-O-methylcytidine-3'-phosphate
  modified_base 8: mod_base = OTHER; note = 2'-O-methyluridine-3'-phosphate
  modified_base 9: mod_base = OTHER; note = 2'-fluoroguanosine-3'-phosphate
  modified_base 10: mod_base = OTHER; note = 2'-fluorouridine-3'-phosphate
  modified_base 11: mod_base = OTHER; note = 2'-fluorouridine-3'-phosphate
  modified_base 12: mod_base = OTHER; note = 2'-O-methyluridine-3'-phosphate
  modified_base 13: mod_base = OTHER; note = 2'-fluorouridine-3'-phosphate
  modified_base 14: mod_base = OTHER; note = 2'-O-methylguanosine-3'-phosphate
  modified_base 15: mod_base = OTHER; note = 2'-O-methylcytidine-3'-phosphate
  modified_base 16: mod_base = OTHER; note = 2'-O-methyluridine-3'-phosphate
  modified_base 17: mod_base = OTHER; note = 2'-fluorouridine-3'-phosphate
  modified_base 18: mod_base = OTHER; note = 2'-O-methyluridine-3'-phosphate
  modified_base 19: mod_base = OTHER; note = 2'-fluorouridine-3'-phosphate
  modified_base 20: mod_base = OTHER; note = 2'-O-methylguanosine-3'-phosphate
  modified_base 21: mod_base = OTHER; note = 2'-O-methyluridine-3'-phosphate N-[tris(GalNAc-alkyl)-amidodecanoyl)]-4-hydroxyprolinol Hyp-(GalNAc-alkyl)3
ctagacctgttttgcttttgt

SEQ ID NO: 422 - RNA, 23 nt, synthetic construct
  source 1..23: mol_type = other RNA; note = Description of Artificial Sequence: Synthetic oligonucleotide
  modified_base 1: mod_base = OTHER; note = 2'-O-methyladenosine-3'-phosphate
  modified_base 2: mod_base = OTHER; note = 2'-fluorocytidine-3'-phosphate
  modified_base 3: mod_base = OTHER; note = 2'-O-methyladenosine-3'-phosphate
  modified_base 4: mod_base = OTHER; note = 2'-fluoroadenosine-3'-phosphate
  modified_base 5: mod_base = OTHER; note = 2'-O-methyladenosine-3'-phosphate
  modified_base 6: mod_base = OTHER; note = 2'-fluoroadenosine-3'-phosphate
  modified_base 7: mod_base = OTHER; note = 2'-O-methylguanosine-3'-phosphate
  modified_base 8: mod_base = OTHER; note = 2'-fluorocytidine-3'-phosphate
  modified_base 9: mod_base = OTHER; note = 2'-O-methyladenosine-3'-phosphate
  modified_base 10: mod_base = OTHER; note = 2'-fluoroadenosine-3'-phosphate
  modified_base 11: mod_base = OTHER; note = 2'-O-methyladenosine-3'-phosphate
  modified_base 12: mod_base = OTHER; note = 2'-O-methyladenosine-3'-phosphate
  modified_base 13: mod_base = OTHER; note = 2'-O-methylcytidine-3'-phosphate
  modified_base 14: mod_base = OTHER; note = 2'-fluoroadenosine-3'-phosphate
  modified_base 15: mod_base = OTHER; note = 2'-O-methylguanosine-3'-phosphate
  modified_base 16: mod_base = OTHER; note = 2'-fluoroguanosine-3'-phosphate
  modified_base 17: mod_base = OTHER; note = 2'-O-methyluridine-3'-phosphate
  modified_base 18: mod_base = OTHER; note = 2'-fluorocytidine-3'-phosphate
  modified_base 19: mod_base = OTHER; note = 2'-O-methyluridine-3'-phosphate
  modified_base 20: mod_base = OTHER; note = 2'-fluoroadenosine-3'-phosphate
  modified_base 21: mod_base = OTHER; note = 2'-O-methylguanosine-3'-phosphorothioate
  modified_base 22: mod_base = OTHER; note = 2'-fluoroadenosine-3'-phosphorothioate
  modified_base 23: mod_base = OTHER; note = 2'-O-methyladenosine-3'-phosphate
acaaaagcaaaacaggtctagaa

SEQ ID NO: 423 - RNA, 21 nt, synthetic construct
  source 1..21: mol_type = other RNA; note = Description of Artificial Sequence: Synthetic oligonucleotide
  modified_base 1: mod_base = OTHER; note = 2'-fluorocytidine-3'-phosphate
  modified_base 2: mod_base = OTHER; note = 2'-O-methyluridine-3'-phosphate
  modified_base 3: mod_base = OTHER; note = 2'-O-methyladenosine-3'-phosphate
  modified_base 4: mod_base = OTHER; note = 2'-O-methylguanosine-3'-phosphate
  modified_base 5: mod_base = OTHER; note = 2'-fluoroadenosine-3'-phosphate
  modified_base 6: mod_base = OTHER; note = 2'-O-methylcytidine-3'-phosphate
  modified_base 7: mod_base = OTHER; note = 2'-O-methylcytidine-3'-phosphate
  modified_base 8: mod_base = OTHER; note = 2'-O-methyluridine-3'-phosphate
  modified_base 9: mod_base = OTHER; note = 2'-fluoroguanosine-3'-phosphate
  modified_base 10: mod_base = OTHER; note = 2'-fluorouridine-3'-phosphate
  modified_base 11: mod_base = OTHER; note = 2'-fluorouridine-3'-phosphate
  modified_base 12: mod_base = OTHER; note = 2'-O-methyluridine-3'-phosphate
  modified_base 13: mod_base = OTHER; note = 2'-O-methyluridine-3'-phosphate
  modified_base 14: mod_base = OTHER; note = 2'-O-methylguanosine-3'-phosphate
  modified_base 15: mod_base = OTHER; note = 2'-O-methylcytidine-3'-phosphate
  modified_base 16: mod_base = OTHER; note = 2'-O-methyluridine-3'-phosphate
  modified_base 17: mod_base = OTHER; note = 2'-fluorouridine-3'-phosphate
  modified_base 18: mod_base = OTHER; note = 2'-O-methyluridine-3'-phosphate
  modified_base 19: mod_base = OTHER; note = 2'-O-methyluridine-3'-phosphate
  modified_base 20: mod_base = OTHER; note = 2'-O-methylguanosine-3'-phosphate
  modified_base 21: mod_base = OTHER; note = 2'-O-methyluridine-3'-phosphate N-[tris(GalNAc-alkyl)-amidodecanoyl)]-4-hydroxyprolinol Hyp-(GalNAc-alkyl)3
ctagacctgttttgcttttgt

SEQ ID NO: 424 - RNA, 23 nt, synthetic construct
  source 1..23: mol_type = other RNA; note = Description of Artificial Sequence: Synthetic oligonucleotide
  modified_base 1: mod_base = OTHER; note = 2'-O-methyladenosine-3'-phosphate
  modified_base 2: mod_base = OTHER; note = 2'-fluorocytidine-3'-phosphate
  modified_base 3: mod_base = OTHER; note = 2'-O-methyladenosine-3'-phosphate
  modified_base 4: mod_base = OTHER; note = 2'-fluoroadenosine-3'-phosphate
  modified_base 5: mod_base = OTHER; note = 2'-O-methyladenosine-3'-phosphate
  modified_base 6: mod_base = OTHER; note = 2'-fluoroadenosine-3'-phosphate
  modified_base 7: mod_base = OTHER; note = 2'-O-methylguanosine-3'-phosphate
  modified_base 8: mod_base = OTHER; note = 2'-fluorocytidine-3'-phosphate
  modified_base 9: mod_base = OTHER; note = 2'-O-methyladenosine-3'-phosphate
  modified_base 10: mod_base = OTHER; note = 2'-fluoroadenosine-3'-phosphate
  modified_base 11: mod_base = OTHER; note = 2'-O-methyladenosine-3'-phosphate
  modified_base 12: mod_base = OTHER; note = 2'-O-methyladenosine-3'-phosphate
  modified_base 13: mod_base = OTHER; note = 2'-O-methylcytidine-3'-phosphate
  modified_base 14: mod_base = OTHER; note = 2'-fluoroadenosine-3'-phosphate
  modified_base 15: mod_base = OTHER; note = 2'-O-methylguanosine-3'-phosphate
  modified_base 16: mod_base = OTHER; note = 2'-fluoroguanosine-3'-phosphate
  modified_base 17: mod_base = OTHER; note = 2'-O-methyluridine-3'-phosphate
  modified_base 18: mod_base = OTHER; note = 2'-fluorocytidine-3'-phosphate
  modified_base 19: mod_base = OTHER; note = 2'-O-methyluridine-3'-phosphate
  modified_base 20: mod_base = OTHER; note = 2'-fluoroadenosine-3'-phosphate
  modified_base 21: mod_base = OTHER; note = 2'-O-methylguanosine-3'-phosphorothioate
  modified_base 22: mod_base = OTHER; note = 2'-fluoroadenosine-3'-phosphorothioate
  modified_base 23: mod_base = OTHER; note = 2'-O-methyladenosine-3'-phosphate
acaaaagcaaaacaggtctagaa

SEQ ID NO: 425 - RNA, 21 nt, synthetic construct
  source 1..21: mol_type = other RNA; note = Description of Artificial Sequence: Synthetic oligonucleotide
  modified_base 1: mod_base = OTHER; note = 2'-fluorocytidine-3'-phosphate
  modified_base 2: mod_base = OTHER; note = 2'-O-methyluridine-3'-phosphate
  modified_base 3: mod_base = OTHER; note = 2'-O-methyladenosine-3'-phosphate
  modified_base 4: mod_base = OTHER; note = 2'-O-methylguanosine-3'-phosphate
  modified_base 5: mod_base = OTHER; note = 2'-O-methyladenosine-3'-phosphate
  modified_base 6: mod_base = OTHER; note = 2'-O-methylcytidine-3'-phosphate
  modified_base 7: mod_base = OTHER; note = 2'-O-methylcytidine-3'-phosphate
  modified_base 8: mod_base = OTHER; note = 2'-O-methyluridine-3'-phosphate
  modified_base 9: mod_base = OTHER; note = 2'-fluoroguanosine-3'-phosphate
  modified_base 10: mod_base = OTHER; note = 2'-fluorouridine-3'-phosphate
  modified_base 11: mod_base = OTHER; note = 2'-fluorouridine-3'-phosphate
  modified_base 12: mod_base = OTHER; note = 2'-O-methyluridine-3'-phosphate
  modified_base 13: mod_base = OTHER; note = 2'-O-methyluridine-3'-phosphate
  modified_base 14: mod_base = OTHER; note = 2'-O-methylguanosine-3'-phosphate
  modified_base 15: mod_base = OTHER; note = 2'-O-methylcytidine-3'-phosphate
  modified_base 16: mod_base = OTHER; note = 2'-O-methyluridine-3'-phosphate
  modified_base 17: mod_base = OTHER; note = 2'-O-methyluridine-3'-phosphate
  modified_base 18: mod_base = OTHER; note = 2'-O-methyluridine-3'-phosphate
  modified_base 19: mod_base = OTHER; note = 2'-O-methyluridine-3'-phosphate
  modified_base 20: mod_base = OTHER; note = 2'-O-methylguanosine-3'-phosphate
  modified_base 21: mod_base = OTHER; note = 2'-O-methyluridine-3'-phosphate N-[tris(GalNAc-alkyl)-amidodecanoyl)]-4-hydroxyprolinol Hyp-(GalNAc-alkyl)3
ctagacctgttttgcttttgt

SEQ ID NO: 426 - RNA, 23 nt, synthetic construct
  source 1..23: mol_type = other RNA; note = Description of Artificial Sequence: Synthetic oligonucleotide
  modified_base 1: mod_base = OTHER; note = 2'-O-methyladenosine-3'-phosphate
  modified_base 2: mod_base = OTHER; note = 2'-fluorocytidine-3'-phosphate
  modified_base 3: mod_base = OTHER; note = 2'-O-methyladenosine-3'-phosphate
  modified_base 4: mod_base = OTHER; note = 2'-fluoroadenosine-3'-phosphate
  modified_base 5: mod_base = OTHER; note = 2'-O-methyladenosine-3'-phosphate
  modified_base 6: mod_base = OTHER; note = 2'-fluoroadenosine-3'-phosphate
  modified_base 7: mod_base = OTHER; note = 2'-O-methylguanosine-3'-phosphate
  modified_base 8: mod_base = OTHER; note = 2'-fluorocytidine-3'-phosphate
  modified_base 9: mod_base = OTHER; note = 2'-O-methyladenosine-3'-phosphate
  modified_base 10: mod_base = OTHER; note = 2'-fluoroadenosine-3'-phosphate
  modified_base 11: mod_base = OTHER; note = 2'-O-methyladenosine-3'-phosphate
  modified_base 12: mod_base = OTHER; note = 2'-O-methyladenosine-3'-phosphate
  modified_base 13: mod_base = OTHER; note = 2'-O-methylcytidine-3'-phosphate
  modified_base 14: mod_base = OTHER; note = 2'-fluoroadenosine-3'-phosphate
  modified_base 15: mod_base = OTHER; note = 2'-O-methylguanosine-3'-phosphate
  modified_base 16: mod_base = OTHER; note = 2'-fluoroguanosine-3'-phosphate
  modified_base 17: mod_base = OTHER; note = 2'-O-methyluridine-3'-phosphate
  modified_base 18: mod_base = OTHER; note = 2'-fluorocytidine-3'-phosphate
  modified_base 19: mod_base = OTHER; note = 2'-O-methyluridine-3'-phosphate
  modified_base 20: mod_base = OTHER; note = 2'-fluoroadenosine-3'-phosphate
  modified_base 21: mod_base = OTHER; note = 2'-O-methylguanosine-3'-phosphorothioate
  modified_base 22: mod_base = OTHER; note = 2'-fluoroadenosine-3'-phosphorothioate
  modified_base 23: mod_base = OTHER; note = 2'-O-methyladenosine-3'-phosphate
acaaaagcaaaacaggtctagaa

SEQ ID NO: 427 - RNA, 21 nt, synthetic construct
  source 1..21: mol_type = other RNA; note = Description of Artificial Sequence: Synthetic oligonucleotide
  modified_base 1: mod_base = OTHER; note = 2'-fluorocytidine-3'-phosphate
  modified_base 2: mod_base = OTHER; note = 2'-O-methyluridine-3'-phosphate
  modified_base 3: mod_base = OTHER; note = 2'-fluoroadenosine-3'-phosphate
  modified_base 4: mod_base = OTHER; note = 2'-fluoroguanosine-3'-phosphate
  modified_base 5: mod_base = OTHER; note = 2'-fluoroadenosine-3'-phosphate
  modified_base 6: mod_base = OTHER; note = 2'-O-methylcytidine-3'-phosphate
  modified_base 7: mod_base = OTHER; note = 2'-fluorocytidine-3'-phosphate
  modified_base 8: mod_base = OTHER; note = 2'-O-methyluridine-3'-phosphate
  modified_base 9: mod_base = OTHER; note = 2'-fluoroguanosine-3'-phosphate
  modified_base 10: mod_base = OTHER; note = 2'-fluorouridine-3'-phosphate
  modified_base 11: mod_base = OTHER; note = 2'-fluorouridine-3'-phosphate
  modified_base 12: mod_base = OTHER; note = 2'-O-methyluridine-3'-phosphate
  modified_base 13: mod_base = OTHER; note = 2'-fluorouridine-3'-phosphate
  modified_base 14: mod_base = OTHER; note = 2'-O-methylguanosine-3'-phosphate
  modified_base 15: mod_base = OTHER; note = 2'-fluorocytidine-3'-phosphate
  modified_base 16: mod_base = OTHER; note = 2'-O-methyluridine-3'-phosphate
  modified_base 17: mod_base = OTHER; note = 2'-fluorouridine-3'-phosphate
  modified_base 18: mod_base = OTHER; note = 2'-O-methyluridine-3'-phosphate
  modified_base 19: mod_base = OTHER; note = 2'-fluorouridine-3'-phosphate
  modified_base 20: mod_base = OTHER; note = 2'-O-methylguanosine-3'-phosphate
  modified_base 21: mod_base = OTHER; note = 2'-fluorouridine-3'-phosphate N-[tris(GalNAc-alkyl)-amidodecanoyl)]-4-hydroxyprolinol Hyp-(GalNAc-alkyl)3
ctagacctgttttgcttttgt

SEQ ID NO: 428 - RNA, 23 nt, synthetic construct
  source 1..23: mol_type = other RNA; note = Description of Artificial Sequence: Synthetic oligonucleotide
  modified_base 1: mod_base = OTHER; note = 2'-O-methyladenosine-3'-phosphate
  modified_base 2: mod_base = OTHER; note = 2'-fluorocytidine-3'-phosphate
  modified_base 3: mod_base = OTHER; note = 2'-O-methyladenosine-3'-phosphate
  modified_base 4: mod_base = OTHER; note = 2'-fluoroadenosine-3'-phosphate
  modified_base 5: mod_base = OTHER; note = 2'-O-methyladenosine-3'-phosphate
  modified_base 6: mod_base = OTHER; note = 2'-fluoroadenosine-3'-phosphate
  modified_base 7: mod_base = OTHER; note = 2'-O-methylguanosine-3'-phosphate
  modified_base 8: mod_base = OTHER; note = 2'-fluorocytidine-3'-phosphate
  modified_base 9: mod_base = OTHER; note = 2'-O-methyladenosine-3'-phosphate
  modified_base 10: mod_base = OTHER; note = 2'-fluoroadenosine-3'-phosphate
  modified_base 11: mod_base = OTHER; note = 2'-O-methyladenosine-3'-phosphate
  modified_base 12: mod_base = OTHER; note = 2'-O-methyladenosine-3'-phosphate
  modified_base 13: mod_base = OTHER; note = 2'-O-methylcytidine-3'-phosphate
  modified_base 14: mod_base = OTHER; note = 2'-fluoroadenosine-3'-phosphate
  modified_base 15: mod_base = OTHER; note = 2'-O-methylguanosine-3'-phosphate
  modified_base 16: mod_base = OTHER; note = 2'-fluoroguanosine-3'-phosphate
  modified_base 17: mod_base = OTHER; note = 2'-O-methyluridine-3'-phosphate
  modified_base 18: mod_base = OTHER; note = 2'-fluorocytidine-3'-phosphate
  modified_base 19: mod_base = OTHER; note = 2'-O-methyluridine-3'-phosphate
  modified_base 20: mod_base = OTHER; note = 2'-fluoroadenosine-3'-phosphate
  modified_base 21: mod_base = OTHER; note = 2'-O-methylguanosine-3'-phosphorothioate
  modified_base 22: mod_base = OTHER; note = 2'-fluoroadenosine-3'-phosphorothioate
  modified_base 23: mod_base = OTHER; note = 2'-O-methyladenosine-3'-phosphate
acaaaagcaaaacaggtctagaa

SEQ ID NO: 429 - RNA, 21 nt, synthetic construct
  source 1..21: mol_type = other RNA; note = Description of Artificial Sequence: Synthetic oligonucleotide
  modified_base 1: mod_base = OTHER; note = 2'-fluorocytidine-3'-phosphate
  modified_base 2: mod_base = OTHER; note = 2'-O-methyluridine-3'-phosphate
  modified_base 3: mod_base = OTHER; note = 2'-fluoroadenosine-3'-phosphate
  modified_base 4: mod_base = OTHER; note = 2'-fluoroguanosine-3'-phosphate
  modified_base 5: mod_base = OTHER; note = 2'-fluoroadenosine-3'-phosphate
  modified_base 6: mod_base = OTHER; note = 2'-O-methylcytidine-3'-phosphate
  modified_base 7: mod_base = OTHER; note = 2'-fluorocytidine-3'-phosphate
  modified_base 8: mod_base = OTHER; note = 2'-O-methyluridine-3'-phosphate
  modified_base 9: mod_base = OTHER; note = 2'-fluoroguanosine-3'-phosphate
  modified_base 10: mod_base = OTHER; note = 2'-fluorouridine-3'-phosphate
  modified_base 11: mod_base = OTHER; note = 2'-fluorouridine-3'-phosphate
  modified_base 12: mod_base = OTHER; note = 2'-O-methyluridine-3'-phosphate
  modified_base 13: mod_base = OTHER; note = 2'-fluorouridine-3'-phosphate
  modified_base 14: mod_base = OTHER; note = 2'-fluoroguanosine-3'-phosphate
  modified_base 15: mod_base = OTHER; note = 2'-fluorocytidine-3'-phosphate
  modified_base 16: mod_base = OTHER; note = 2'-O-methyluridine-3'-phosphate
  modified_base 17: mod_base = OTHER; note = 2'-fluorouridine-3'-phosphate
  modified_base 18: mod_base = OTHER; note = 2'-O-methyluridine-3'-phosphate
  modified_base 19: mod_base = OTHER; note = 2'-fluorouridine-3'-phosphate
  modified_base 20: mod_base = OTHER; note = 2'-O-methylguanosine-3'-phosphate
  modified_base 21: mod_base = OTHER; note = 2'-fluorouridine-3'-phosphate N-[tris(GalNAc-alkyl)-amidodecanoyl)]-4-hydroxyprolinol Hyp-(GalNAc-alkyl)3
ctagacctgttttgcttttgt

SEQ ID NO: 430 - RNA, 23 nt, synthetic construct
  source 1..23: mol_type = other RNA; note = Description of Artificial Sequence: Synthetic oligonucleotide
  modified_base 1: mod_base = OTHER; note = 2'-O-methyladenosine-3'-phosphate
  modified_base 2: mod_base = OTHER; note = 2'-fluorocytidine-3'-phosphate
  modified_base 3: mod_base = OTHER; note = 2'-O-methyladenosine-3'-phosphate
  modified_base 4: mod_base = OTHER; note = 2'-fluoroadenosine-3'-phosphate
  modified_base 5: mod_base = OTHER; note = 2'-O-methyladenosine-3'-phosphate
  modified_base 6: mod_base = OTHER; note = 2'-fluoroadenosine-3'-phosphate
  modified_base 7: mod_base = OTHER; note = 2'-O-methylguanosine-3'-phosphate
  modified_base 8: mod_base = OTHER; note = 2'-fluorocytidine-3'-phosphate
  modified_base 9: mod_base = OTHER; note = 2'-O-methyladenosine-3'-phosphate
  modified_base 10: mod_base = OTHER; note = 2'-fluoroadenosine-3'-phosphate
  modified_base 11: mod_base = OTHER; note = 2'-O-methyladenosine-3'-phosphate
  modified_base 12: mod_base = OTHER; note = 2'-O-methyladenosine-3'-phosphate
  modified_base 13: mod_base = OTHER; note = 2'-O-methylcytidine-3'-phosphate
  modified_base 14: mod_base = OTHER; note = 2'-fluoroadenosine-3'-phosphate
  modified_base 15: mod_base = OTHER; note = 2'-O-methylguanosine-3'-phosphate
  modified_base 16: mod_base = OTHER; note = 2'-fluoroguanosine-3'-phosphate
  modified_base 17: mod_base = OTHER; note = 2'-O-methyluridine-3'-phosphate
  modified_base 18: mod_base = OTHER; note = 2'-fluorocytidine-3'-phosphate
  modified_base 19: mod_base = OTHER; note = 2'-O-methyluridine-3'-phosphate
  modified_base 20: mod_base = OTHER; note = 2'-fluoroadenosine-3'-phosphate
  modified_base 21: mod_base = OTHER; note = 2'-O-methylguanosine-3'-phosphorothioate
  modified_base 22: mod_base = OTHER; note = 2'-fluoroadenosine-3'-phosphorothioate
  modified_base 23: mod_base = OTHER; note = 2'-O-methyladenosine-3'-phosphate
acaaaagcaaaacaggtctagaa

SEQ ID NO: 431 - RNA, 21 nt, synthetic construct
  source 1..21: mol_type = other RNA; note = Description of Artificial Sequence: Synthetic oligonucleotide
  modified_base 1: mod_base = OTHER; note = 2'-fluorocytidine-3'-phosphate
  modified_base 2: mod_base = OTHER; note = 2'-O-methyluridine-3'-phosphate
  modified_base 3: mod_base = OTHER; note = 2'-fluoroadenosine-3'-phosphate
  modified_base 4: mod_base = OTHER; note = 2'-fluoroguanosine-3'-phosphate
  modified_base 5: mod_base = OTHER; note = 2'-fluoroadenosine-3'-phosphate
  modified_base 6: mod_base = OTHER; note = 2'-O-methylcytidine-3'-phosphate
  modified_base 7: mod_base = OTHER; note = 2'-fluorocytidine-3'-phosphate
  modified_base 8: mod_base = OTHER; note = 2'-O-methyluridine-3'-phosphate
  modified_base 9: mod_base = OTHER; note = 2'-fluoroguanosine-3'-phosphate
  modified_base 10: mod_base = OTHER; note = 2'-fluorouridine-3'-phosphate
  modified_base 11: mod_base = OTHER; note = 2'-fluorouridine-3'-phosphate
  modified_base 12: mod_base = OTHER; note = 2'-O-methyluridine-3'-phosphate
  modified_base 13: mod_base = OTHER; note = 2'-fluorouridine-3'-phosphate
  modified_base 14: mod_base = OTHER; note = 2'-fluoroguanosine-3'-phosphate
  modified_base 15: mod_base = OTHER; note = 2'-fluorocytidine-3'-phosphate
  modified_base 16: mod_base = OTHER; note = 2'-O-methyluridine-3'-phosphate
  modified_base 17: mod_base = OTHER; note = 2'-fluorouridine-3'-phosphate
  modified_base 18: mod_base = OTHER; note = 2'-fluorouridine-3'-phosphate
  modified_base 19: mod_base = OTHER; note = 2'-fluorouridine-3'-phosphate
  modified_base 20: mod_base = OTHER; note = 2'-O-methylguanosine-3'-phosphate
  modified_base 21: mod_base = OTHER; note = 2'-fluorouridine-3'-phosphate N-[tris(GalNAc-alkyl)-amidodecanoyl)]-4-hydroxyprolinol Hyp-(GalNAc-alkyl)3
ctagacctgttttgcttttgt

SEQ ID NO: 432 - RNA, 23 nt, synthetic construct
  source 1..23: mol_type = other RNA; note = Description of Artificial Sequence: Synthetic oligonucleotide
  modified_base 1: mod_base = OTHER; note = 2'-O-methyladenosine-3'-phosphate
  modified_base 2: mod_base = OTHER; note = 2'-fluorocytidine-3'-phosphate
  modified_base 3: mod_base = OTHER; note = 2'-O-methyladenosine-3'-phosphate
  modified_base 4: mod_base = OTHER; note = 2'-fluoroadenosine-3'-phosphate
  modified_base 5: mod_base = OTHER; note = 2'-O-methyladenosine-3'-phosphate
  modified_base 6: mod_base = OTHER; note = 2'-fluoroadenosine-3'-phosphate
  modified_base 7: mod_base = OTHER; note = 2'-O-methylguanosine-3'-phosphate
  modified_base 8: mod_base = OTHER; note = 2'-fluorocytidine-3'-phosphate
  modified_base 9: mod_base = OTHER; note = 2'-O-methyladenosine-3'-phosphate
  modified_base 10: mod_base = OTHER; note = 2'-fluoroadenosine-3'-phosphate
  modified_base 11: mod_base = OTHER; note = 2'-O-methyladenosine-3'-phosphate
  modified_base 12: mod_base = OTHER; note = 2'-O-methyladenosine-3'-phosphate
  modified_base 13: mod_base = OTHER; note = 2'-O-methylcytidine-3'-phosphate
  modified_base 14: mod_base = OTHER; note = 2'-fluoroadenosine-3'-phosphate
  modified_base 15: mod_base = OTHER; note = 2'-O-methylguanosine-3'-phosphate
  modified_base 16: mod_base = OTHER; note = 2'-fluoroguanosine-3'-phosphate
  modified_base 17: mod_base = OTHER; note = 2'-O-methyluridine-3'-phosphate
  modified_base 18: mod_base = OTHER; note = 2'-fluorocytidine-3'-phosphate
  modified_base 19: mod_base = OTHER; note = 2'-O-methyluridine-3'-phosphate
  modified_base 20: mod_base = OTHER; note = 2'-fluoroadenosine-3'-phosphate
  modified_base 21: mod_base = OTHER; note = 2'-O-methylguanosine-3'-phosphorothioate
  modified_base 22: mod_base = OTHER; note = 2'-fluoroadenosine-3'-phosphorothioate
  modified_base 23: mod_base = OTHER; note = 2'-O-methyladenosine-3'-phosphate
acaaaagcaaaacaggtctagaa

SEQ ID NO: 433 - RNA, 21 nt, synthetic construct
  source 1..21: mol_type = other RNA; note = Description of Artificial Sequence: Synthetic oligonucleotide
  modified_base 1: mod_base = OTHER; note = 2'-fluorocytidine-3'-phosphate
  modified_base 2: mod_base = OTHER; note = 2'-O-methyluridine-3'-phosphate
  modified_base 3: mod_base = OTHER; note = 2'-fluoroadenosine-3'-phosphate
  modified_base 4: mod_base = OTHER; note = 2'-fluoroguanosine-3'-phosphate
  modified_base 5: mod_base = OTHER; note = 2'-fluoroadenosine-3'-phosphate
  modified_base 6: mod_base = OTHER; note = 2'-fluorocytidine-3'-phosphate
  modified_base 7: mod_base = OTHER; note = 2'-fluorocytidine-3'-phosphate
  modified_base 8: mod_base = OTHER; note = 2'-O-methyluridine-3'-phosphate
  modified_base 9: mod_base = OTHER; note = 2'-fluoroguanosine-3'-phosphate
  modified_base 10: mod_base = OTHER; note = 2'-fluorouridine-3'-phosphate
  modified_base 11: mod_base = OTHER; note = 2'-fluorouridine-3'-phosphate
  modified_base 12: mod_base = OTHER; note = 2'-O-methyluridine-3'-phosphate
  modified_base 13: mod_base = OTHER; note = 2'-fluorouridine-3'-phosphate
  modified_base 14: mod_base = OTHER; note = 2'-fluoroguanosine-3'-phosphate
  modified_base 15: mod_base = OTHER; note = 2'-fluorocytidine-3'-phosphate
  modified_base 16: mod_base = OTHER; note = 2'-O-methyluridine-3'-phosphate
  modified_base 17: mod_base = OTHER; note = 2'-fluorouridine-3'-phosphate
  modified_base 18: mod_base = OTHER; note = 2'-fluorouridine-3'-phosphate
  modified_base 19: mod_base = OTHER; note = 2'-fluorouridine-3'-phosphate
  modified_base 20: mod_base = OTHER; note = 2'-fluoroguanosine-3'-phosphate
  modified_base 21: mod_base = OTHER; note = 2'-fluorouridine-3'-phosphate N-[tris(GalNAc-alkyl)-amidodecanoyl)]-4-hydroxyprolinol Hyp-(GalNAc-alkyl)3
ctagacctgttttgcttttgt

SEQ ID NO: 434 - RNA, 23 nt, synthetic construct
  source 1..23: mol_type = other RNA; note = Description of Artificial Sequence: Synthetic oligonucleotide
  modified_base 1: mod_base = OTHER; note = 2'-O-methyladenosine-3'-phosphate
  modified_base 2: mod_base = OTHER; note = 2'-fluorocytidine-3'-phosphate
  modified_base 3: mod_base = OTHER; note = 2'-O-methyladenosine-3'-phosphate
  modified_base 4: mod_base = OTHER; note = 2'-fluoroadenosine-3'-phosphate
  modified_base 5: mod_base = OTHER; note = 2'-O-methyladenosine-3'-phosphate
  modified_base 6: mod_base = OTHER; note = 2'-fluoroadenosine-3'-phosphate
  modified_base 7: mod_base = OTHER; note = 2'-O-methylguanosine-3'-phosphate
  modified_base 8: mod_base = OTHER; note = 2'-fluorocytidine-3'-phosphate
  modified_base 9: mod_base = OTHER; note = 2'-O-methyladenosine-3'-phosphate
  modified_base 10: mod_base = OTHER; note = 2'-fluoroadenosine-3'-phosphate
  modified_base 11: mod_base = OTHER; note = 2'-O-methyladenosine-3'-phosphate
  modified_base 12: mod_base = OTHER; note = 2'-O-methyladenosine-3'-phosphate
  modified_base 13: mod_base = OTHER; note = 2'-O-methylcytidine-3'-phosphate
  modified_base 14: mod_base = OTHER; note = 2'-fluoroadenosine-3'-phosphate
  modified_base 15: mod_base = OTHER; note = 2'-O-methylguanosine-3'-phosphate
  modified_base 16: mod_base = OTHER; note = 2'-fluoroguanosine-3'-phosphate
  modified_base 17: mod_base = OTHER; note = 2'-O-methyluridine-3'-phosphate
  modified_base 18: mod_base = OTHER; note = 2'-fluorocytidine-3'-phosphate
  modified_base 19: mod_base = OTHER; note = 2'-O-methyluridine-3'-phosphate
  modified_base 20: mod_base = OTHER; note = 2'-fluoroadenosine-3'-phosphate
  modified_base 21: mod_base = OTHER; note = 2'-O-methylguanosine-3'-phosphorothioate
  modified_base 22: mod_base = OTHER; note = 2'-fluoroadenosine-3'-phosphorothioate
  modified_base 23: mod_base = OTHER; note = 2'-O-methyladenosine-3'-phosphate
acaaaagcaaaacaggtctagaa

SEQ ID NO: 435 - RNA, 21 nt, synthetic construct
  source 1..21: mol_type = other RNA; note = Description of Artificial Sequence: Synthetic oligonucleotide
  modified_base 1: mod_base = OTHER; note = 2'-fluorocytidine-3'-phosphate
  modified_base 2: mod_base = OTHER; note = 2'-fluorouridine-3'-phosphate
  modified_base 3: mod_base = OTHER; note = 2'-fluoroadenosine-3'-phosphate
  modified_base 4: mod_base = OTHER; note = 2'-fluoroguanosine-3'-phosphate
  modified_base 5: mod_base = OTHER; note = 2'-fluoroadenosine-3'-phosphate
  modified_base 6: mod_base = OTHER; note = 2'-fluorocytidine-3'-phosphate
  modified_base 7: mod_base = OTHER; note = 2'-fluorocytidine-3'-phosphate
  modified_base 8: mod_base = OTHER; note = 2'-O-methyluridine-3'-phosphate
  modified_base 9: mod_base = OTHER; note = 2'-fluoroguanosine-3'-phosphate
  modified_base 10: mod_base = OTHER; note = 2'-fluorouridine-3'-phosphate
  modified_base 11: mod_base = OTHER; note = 2'-fluorouridine-3'-phosphate
  modified_base 12: mod_base = OTHER; note = 2'-O-methyluridine-3'-phosphate
  modified_base 13: mod_base = OTHER; note = 2'-fluorouridine-3'-phosphate
  modified_base 14: mod_base = OTHER; note = 2'-fluoroguanosine-3'-phosphate
  modified_base 15: mod_base = OTHER; note = 2'-fluorocytidine-3'-phosphate
  modified_base 16: mod_base = OTHER; note = 2'-fluorouridine-3'-phosphate
  modified_base 17: mod_base = OTHER; note = 2'-fluorouridine-3'-phosphate
  modified_base 18: mod_base = OTHER; note = 2'-fluorouridine-3'-phosphate
  modified_base 19: mod_base = OTHER; note = 2'-fluorouridine-3'-phosphate
  modified_base 20: mod_base = OTHER; note = 2'-fluoroguanosine-3'-phosphate
  modified_base 21: mod_base = OTHER; note = 2'-fluorouridine-3'-phosphate N-[tris(GalNAc-alkyl)-amidodecanoyl)]-4-hydroxyprolinol Hyp-(GalNAc-alkyl)3
ctagacctgttttgcttttgt

SEQ ID NO: 436 - RNA, 23 nt, synthetic construct
  source 1..23: mol_type = other RNA; note = Description of Artificial Sequence: Synthetic oligonucleotide
  modified_base 1: mod_base = OTHER; note = 2'-O-methyladenosine-3'-phosphate
  modified_base 2: mod_base = OTHER; note = 2'-fluorocytidine-3'-phosphate
  modified_base 3: mod_base = OTHER; note = 2'-O-methyladenosine-3'-phosphate
  modified_base 4: mod_base = OTHER; note = 2'-fluoroadenosine-3'-phosphate
  modified_base 5: mod_base = OTHER; note = 2'-O-methyladenosine-3'-phosphate
  modified_base 6: mod_base = OTHER; note = 2'-fluoroadenosine-3'-phosphate
  modified_base 7: mod_base = OTHER; note = 2'-O-methylguanosine-3'-phosphate
  modified_base 8: mod_base = OTHER; note = 2'-fluorocytidine-3'-phosphate
  modified_base 9: mod_base = OTHER; note = 2'-O-methyladenosine-3'-phosphate
  modified_base 10: mod_base = OTHER; note = 2'-fluoroadenosine-3'-phosphate
  modified_base 11: mod_base = OTHER; note = 2'-O-methyladenosine-3'-phosphate
  modified_base 12: mod_base = OTHER; note = 2'-O-methyladenosine-3'-phosphate
  modified_base 13: mod_base = OTHER; note = 2'-O-methylcytidine-3'-phosphate
  modified_base 14: mod_base = OTHER; note = 2'-fluoroadenosine-3'-phosphate
  modified_base 15: mod_base = OTHER; note = 2'-O-methylguanosine-3'-phosphate
  modified_base 16: mod_base = OTHER; note = 2'-fluoroguanosine-3'-phosphate
  modified_base 17: mod_base = OTHER; note = 2'-O-methyluridine-3'-phosphate
  modified_base 18: mod_base = OTHER; note = 2'-fluorocytidine-3'-phosphate
  modified_base 19: mod_base = OTHER; note = 2'-O-methyluridine-3'-phosphate
  modified_base 20: mod_base = OTHER; note = 2'-fluoroadenosine-3'-phosphate
  modified_base 21: mod_base = OTHER; note = 2'-O-methylguanosine-3'-phosphorothioate
  modified_base 22: mod_base = OTHER; note = 2'-fluoroadenosine-3'-phosphorothioate
  modified_base 23: mod_base = OTHER; note = 2'-O-methyladenosine-3'-phosphate
acaaaagcaaaacaggtctagaa

SEQ ID NO: 437 - RNA, 21 nt, synthetic construct
  source 1..21: mol_type = other RNA; note = Description of Artificial Sequence: Synthetic oligonucleotide
  modified_base 1: mod_base = OTHER; note = 2'-fluorocytidine-3'-phosphate
  modified_base 2: mod_base = OTHER; note = 2'-fluorouridine-3'-phosphate
  modified_base 3: mod_base = OTHER; note = 2'-fluoroadenosine-3'-phosphate
  modified_base 4: mod_base = OTHER; note = 2'-fluoroguanosine-3'-phosphate
  modified_base 5: mod_base = OTHER; note = 2'-fluoroadenosine-3'-phosphate
  modified_base 6: mod_base = OTHER; note = 2'-fluorocytidine-3'-phosphate
  modified_base 7: mod_base = OTHER; note = 2'-fluorocytidine-3'-phosphate
  modified_base 8: mod_base = OTHER; note = 2'-fluorouridine-3'-phosphate
  modified_base 9: mod_base = OTHER; note = 2'-fluoroguanosine-3'-phosphate
  modified_base 10: mod_base = OTHER; note = 2'-fluorouridine-3'-phosphate
  modified_base 11: mod_base = OTHER; note = 2'-fluorouridine-3'-phosphate
  modified_base 12: mod_base = OTHER; note = 2'-fluorouridine-3'-phosphate
  modified_base 13: mod_base = OTHER; note = 2'-fluorouridine-3'-phosphate
  modified_base 14: mod_base = OTHER; note = 2'-fluoroguanosine-3'-phosphate
  modified_base 15: mod_base = OTHER; note = 2'-fluorocytidine-3'-phosphate
  modified_base 16: mod_base = OTHER; note = 2'-fluorouridine-3'-phosphate
  modified_base 17: mod_base = OTHER; note = 2'-fluorouridine-3'-phosphate
  modified_base 18: mod_base = OTHER; note = 2'-fluorouridine-3'-phosphate
  modified_base 19: mod_base = OTHER; note = 2'-fluorouridine-3'-phosphate
  modified_base 20: mod_base = OTHER; note = 2'-fluoroguanosine-3'-phosphate
  modified_base 21: mod_base = OTHER; note = 2'-fluorouridine-3'-phosphate N-[tris(GalNAc-alkyl)-amidodecanoyl)]-4-hydroxyprolinol Hyp-(GalNAc-alkyl)3
ctagacctgttttgcttttgt

SEQ ID NO: 438 - RNA, 23 nt, synthetic construct
  source 1..23: mol_type = other RNA; note = Description of Artificial Sequence: Synthetic oligonucleotide
  modified_base 1: mod_base = OTHER; note = 2'-O-methyladenosine-3'-phosphate
  modified_base 2: mod_base = OTHER; note = 2'-fluorocytidine-3'-phosphate
  modified_base 3: mod_base = OTHER; note = 2'-O-methyladenosine-3'-phosphate
  modified_base 4: mod_base = OTHER; note = 2'-fluoroadenosine-3'-phosphate
  modified_base 5: mod_base = OTHER; note = 2'-O-methyladenosine-3'-phosphate
  modified_base 6: mod_base = OTHER; note = 2'-fluoroadenosine-3'-phosphate
  modified_base 7: mod_base = OTHER; note = 2'-O-methylguanosine-3'-phosphate
  modified_base 8: mod_base = OTHER; note = 2'-fluorocytidine-3'-phosphate
  modified_base 9: mod_base = OTHER; note = 2'-O-methyladenosine-3'-phosphate
  modified_base 10: mod_base = OTHER; note = 2'-fluoroadenosine-3'-phosphate
  modified_base 11: mod_base = OTHER; note = 2'-O-methyladenosine-3'-phosphate
  modified_base 12: mod_base = OTHER; note = 2'-O-methyladenosine-3'-phosphate
  modified_base 13: mod_base = OTHER; note = 2'-O-methylcytidine-3'-phosphate
  modified_base 14: mod_base = OTHER; note = 2'-fluoroadenosine-3'-phosphate
  modified_base 15: mod_base = OTHER; note = 2'-O-methylguanosine-3'-phosphate
  modified_base 16: mod_base = OTHER; note = 2'-fluoroguanosine-3'-phosphate
  modified_base 17: mod_base = OTHER; note = 2'-O-methyluridine-3'-phosphate
  modified_base 18: mod_base = OTHER; note = 2'-fluorocytidine-3'-phosphate
  modified_base 19: mod_base = OTHER; note = 2'-O-methyluridine-3'-phosphate
  modified_base 20: mod_base = OTHER; note = 2'-fluoroadenosine-3'-phosphate
  modified_base 21: mod_base = OTHER; note = 2'-O-methylguanosine-3'-phosphorothioate
  modified_base 22: mod_base = OTHER; note = 2'-fluoroadenosine-3'-phosphorothioate
  modified_base 23: mod_base = OTHER; note = 2'-O-methyladenosine-3'-phosphate
acaaaagcaaaacaggtctagaa

SEQ ID NO: 439 - RNA, 21 nt, synthetic construct
  source 1..21: mol_type = other RNA; note = Description of Artificial Sequence: Synthetic oligonucleotide
  modified_base 1: mod_base = OTHER; note = 2'-fluorocytidine-3'-phosphate
  modified_base 2: mod_base = OTHER; note = 2'-O-methyluridine-3'-phosphate
  modified_base 3: mod_base = OTHER; note = 2'-fluoroadenosine-3'-phosphate
  modified_base 4: mod_base = OTHER; note = 2'-O-methylguanosine-3'-phosphate
  modified_base 5: mod_base = OTHER; note = 2'-fluoroadenosine-3'-phosphate
  modified_base 6: mod_base = OTHER; note = 2'-O-methylcytidine-3'-phosphate
  modified_base 7: mod_base = OTHER; note = 2'-fluorocytidine-3'-phosphate
  modified_base 8: mod_base = OTHER; note = 2'-O-methyluridine-3'-phosphate
  modified_base 9: mod_base = OTHER; note = 2'-fluoroguanosine-3'-phosphate
  modified_base 10: mod_base = OTHER; note = 2'-fluorouridine-3'-phosphate
  modified_base 11: mod_base = OTHER; note = 2'-fluorouridine-3'-phosphate
  modified_base 12: mod_base = OTHER; note = 2'-O-methyluridine-3'-phosphate
  modified_base 13: mod_base = OTHER; note = 2'-fluorouridine-3'-phosphate
  modified_base 14: mod_base = OTHER; note = 2'-O-methylguanosine-3'-phosphate
  modified_base 15: mod_base = OTHER; note = 2'-fluorocytidine-3'-phosphate
  modified_base 16: mod_base = OTHER; note = 2'-O-methyluridine-3'-phosphate
  modified_base 17: mod_base = OTHER; note = 2'-fluorouridine-3'-phosphate
  modified_base 18: mod_base = OTHER; note = 2'-O-methyluridine-3'-phosphate
  modified_base 19: mod_base = OTHER; note = 2'-fluorouridine-3'-phosphate
  modified_base 20: mod_base = OTHER; note = 2'-O-methylguanosine-3'-phosphate
  modified_base 21: mod_base = OTHER; note = 2'-fluorouridine-3'-phosphate N-[tris(GalNAc-alkyl)-amidodecanoyl)]-4-hydroxyprolinol Hyp-(GalNAc-alkyl)3
ctagacctgttttgcttttgt

SEQ ID NO: 440 - RNA, 23 nt, synthetic construct
  source 1..23: mol_type = other RNA; note = Description of Artificial Sequence: Synthetic oligonucleotide
  modified_base 1: mod_base = OTHER; note = 2'-O-methyladenosine-3'-phosphate
  modified_base 2: mod_base = OTHER; note = 2'-O-methylcytidine-3'-phosphate
  modified_base 3: mod_base = OTHER; note = 2'-O-methyladenosine-3'-phosphate
  modified_base 4: mod_base = OTHER; note = 2'-fluoroadenosine-3'-phosphate
  modified_base 5: mod_base = OTHER; note = 2'-O-methyladenosine-3'-phosphate
  modified_base 6: mod_base = OTHER; note = 2'-fluoroadenosine-3'-phosphate
  modified_base 7: mod_base = OTHER; note = 2'-O-methylguanosine-3'-phosphate
  modified_base 8: mod_base = OTHER; note = 2'-O-methylcytidine-3'-phosphate
  modified_base 9: mod_base = OTHER; note = 2'-O-methyladenosine-3'-phosphate
  modified_base 10: mod_base = OTHER; note = 2'-fluoroadenosine-3'-phosphate
  modified_base 11: mod_base = OTHER; note = 2'-O-methyladenosine-3'-phosphate
  modified_base 12: mod_base = OTHER; note = 2'-O-methyladenosine-3'-phosphate
  modified_base 13: mod_base = OTHER; note = 2'-O-methylcytidine-3'-phosphate
  modified_base 14: mod_base = OTHER; note = 2'-fluoroadenosine-3'-phosphate
  modified_base 15: mod_base = OTHER; note = 2'-O-methylguanosine-3'-phosphate
  modified_base 16: mod_base = OTHER; note = 2'-fluoroguanosine-3'-phosphate
  modified_base 17: mod_base = OTHER; note = 2'-O-methyluridine-3'-phosphate
  modified_base 18: mod_base = OTHER; note = 2'-fluorocytidine-3'-phosphate
  modified_base 19: mod_base = OTHER; note = 2'-O-methyluridine-3'-phosphate
  modified_base 20: mod_base = OTHER; note = 2'-fluoroadenosine-3'-phosphate
  modified_base 21: mod_base = OTHER; note = 2'-O-methylguanosine-3'-phosphorothioate
  modified_base 22: mod_base = OTHER; note = 2'-fluoroadenosine-3'-phosphorothioate
  modified_base 23: mod_base = OTHER; note = 2'-O-methyladenosine-3'-phosphate
acaaaagcaaaacaggtctagaa

SEQ ID NO: 441 - RNA, 21 nt, synthetic construct
  source 1..21: mol_type = other RNA; note = Description of Artificial Sequence: Synthetic oligonucleotide
  modified_base 1: mod_base = OTHER; note = 2'-O-methylcytidine-3'-phosphate
  modified_base 2: mod_base = OTHER; note = 2'-O-methyluridine-3'-phosphate
  modified_base 3: mod_base = OTHER; note = 2'-fluoroadenosine-3'-phosphate
  modified_base 4: mod_base = OTHER; note = 2'-O-methylguanosine-3'-phosphate
  modified_base 5: mod_base = OTHER; note = 2'-fluoroadenosine-3'-phosphate
  modified_base 6: mod_base = OTHER; note = 2'-O-methylcytidine-3'-phosphate
  modified_base 7: mod_base = OTHER; note = 2'-fluorocytidine-3'-phosphate
  modified_base 8: mod_base = OTHER; note = 2'-O-methyluridine-3'-phosphate
  modified_base 9: mod_base = OTHER; note = 2'-fluoroguanosine-3'-phosphate
  modified_base 10: mod_base = OTHER; note = 2'-fluorouridine-3'-phosphate
  modified_base 11: mod_base = OTHER; note = 2'-fluorouridine-3'-phosphate
  modified_base 12: mod_base = OTHER; note = 2'-O-methyluridine-3'-phosphate
  modified_base 13: mod_base = OTHER; note = 2'-fluorouridine-3'-phosphate
  modified_base 14: mod_base = OTHER; note = 2'-O-methylguanosine-3'-phosphate
  modified_base 15: mod_base = OTHER; note = 2'-fluorocytidine-3'-phosphate
  modified_base 16: mod_base = OTHER; note = 2'-O-methyluridine-3'-phosphate
  modified_base 17: mod_base = OTHER; note = 2'-fluorouridine-3'-phosphate
  modified_base 18: mod_base = OTHER; note = 2'-O-methyluridine-3'-phosphate
  modified_base 19: mod_base = OTHER; note = 2'-fluorouridine-3'-phosphate
  modified_base 20: mod_base = OTHER; note = 2'-O-methylguanosine-3'-phosphate
  modified_base 21: mod_base = OTHER; note = 2'-fluorouridine-3'-phosphate N-[tris(GalNAc-alkyl)-amidodecanoyl)]-4-hydroxyprolinol Hyp-(GalNAc-alkyl)3
ctagacctgttttgcttttgt

SEQ ID NO: 442 - RNA, 23 nt, synthetic construct
  source 1..23: mol_type = other RNA; note = Description of Artificial Sequence: Synthetic oligonucleotide
  modified_base 1: mod_base = OTHER; note = 2'-O-methyladenosine-3'-phosphate
  modified_base 2: mod_base = OTHER; note = 2'-O-methylcytidine-3'-phosphate
  modified_base 3: mod_base = OTHER; note = 2'-O-methyladenosine-3'-phosphate
  modified_base 4: mod_base = OTHER; note = 2'-fluoroadenosine-3'-phosphate
  modified_base 5: mod_base = OTHER; note = 2'-O-methyladenosine-3'-phosphate
  modified_base 6: mod_base = OTHER; note = 2'-fluoroadenosine-3'-phosphate
  modified_base 7: mod_base = OTHER; note = 2'-O-methylguanosine-3'-phosphate
  modified_base 8: mod_base = OTHER; note = 2'-O-methylcytidine-3'-phosphate
  modified_base 9: mod_base = OTHER; note = 2'-O-methyladenosine-3'-phosphate
  modified_base 10: mod_base = OTHER; note = 2'-fluoroadenosine-3'-phosphate
  modified_base 11: mod_base = OTHER; note = 2'-O-methyladenosine-3'-phosphate
  modified_base 12: mod_base = OTHER; note = 2'-O-methyladenosine-3'-phosphate
  modified_base 13: mod_base = OTHER; note = 2'-O-methylcytidine-3'-phosphate
  modified_base 14: mod_base = OTHER; note = 2'-fluoroadenosine-3'-phosphate
  modified_base 15: mod_base = OTHER; note = 2'-O-methylguanosine-3'-phosphate
  modified_base 16: mod_base = OTHER; note = 2'-fluoroguanosine-3'-phosphate
  modified_base 17: mod_base = OTHER; note = 2'-O-methyluridine-3'-phosphate
  modified_base 18: mod_base = OTHER; note = 2'-fluorocytidine-3'-phosphate
  modified_base 19: mod_base = OTHER; note = 2'-O-methyluridine-3'-phosphate
  modified_base 20: mod_base = OTHER; note = 2'-fluoroadenosine-3'-phosphate
  modified_base 21: mod_base = OTHER; note = 2'-O-methylguanosine-3'-phosphorothioate
  modified_base 22: mod_base = OTHER; note = 2'-fluoroadenosine-3'-phosphorothioate
  modified_base 23: mod_base = OTHER; note = 2'-O-methyladenosine-3'-phosphate
acaaaagcaaaacaggtctagaa

SEQ ID NO: 443 - RNA, 21 nt, synthetic construct
  source 1..21: mol_type = other RNA; note = Description of Artificial Sequence: Synthetic oligonucleotide
  modified_base 1: mod_base = OTHER; note = 2'-O-methylcytidine-3'-phosphate
  modified_base 2: mod_base = OTHER; note = 2'-O-methyluridine-3'-phosphate
  modified_base 3: mod_base = OTHER; note = 2'-fluoroadenosine-3'-phosphate
  modified_base 4: mod_base = OTHER; note = 2'-O-methylguanosine-3'-phosphate
  modified_base 5: mod_base = OTHER; note = 2'-fluoroadenosine-3'-phosphate
  modified_base 6: mod_base = OTHER; note = 2'-O-methylcytidine-3'-phosphate
  modified_base 7: mod_base = OTHER; note = 2'-fluorocytidine-3'-phosphate
  modified_base 8: mod_base = OTHER; note = 2'-O-methyluridine-3'-phosphate
  modified_base 9: mod_base = OTHER; note = 2'-fluoroguanosine-3'-phosphate
  modified_base 10: mod_base = OTHER; note = 2'-fluorouridine-3'-phosphate
  modified_base 11: mod_base = OTHER; note = 2'-fluorouridine-3'-phosphate
  modified_base 12: mod_base = OTHER; note = 2'-O-methyluridine-3'-phosphate
  modified_base 13: mod_base = OTHER; note = 2'-O-methyluridine-3'-phosphate
  modified_base 14: mod_base = OTHER; note = 2'-O-methylguanosine-3'-phosphate
  modified_base 15: mod_base = OTHER; note = 2'-fluorocytidine-3'-phosphate
  modified_base 16: mod_base = OTHER; note = 2'-O-methyluridine-3'-phosphate
  modified_base 17: mod_base = OTHER; note = 2'-fluorouridine-3'-phosphate
  modified_base 18: mod_base = OTHER; note = 2'-O-methyluridine-3'-phosphate
  modified_base 19: mod_base = OTHER; note = 2'-O-methyluridine-3'-phosphate
  modified_base 20: mod_base = OTHER; note = 2'-O-methylguanosine-3'-phosphate
  modified_base 21: mod_base = OTHER; note = 2'-fluorouridine-3'-phosphate N-[tris(GalNAc-alkyl)-amidodecanoyl)]-4-hydroxyprolinol Hyp-(GalNAc-alkyl)3
ctagacctgttttgcttttgt

SEQ ID NO: 444 - RNA, 23 nt, synthetic construct
  source 1..23: mol_type = other RNA; note = Description of Artificial Sequence: Synthetic oligonucleotide
  modified_base 1: mod_base = OTHER; note = 2'-O-methyladenosine-3'-phosphate
  modified_base 2: mod_base = OTHER; note = 2'-O-methylcytidine-3'-phosphate
  modified_base 3: mod_base = OTHER; note = 2'-O-methyladenosine-3'-phosphate
  modified_base 4: mod_base = OTHER; note = 2'-fluoroadenosine-3'-phosphate
  modified_base 5: mod_base = OTHER; note = 2'-O-methyladenosine-3'-phosphate
  modified_base 6: mod_base = OTHER; note = 2'-fluoroadenosine-3'-phosphate
  modified_base 7: mod_base = OTHER; note = 2'-O-methylguanosine-3'-phosphate
  modified_base 8: mod_base = OTHER; note = 2'-O-methylcytidine-3'-phosphate
  modified_base 9: mod_base = OTHER; note = 2'-O-methyladenosine-3'-phosphate
  modified_base 10: mod_base = OTHER; note = 2'-fluoroadenosine-3'-phosphate
  modified_base 11: mod_base = OTHER; note = 2'-O-methyladenosine-3'-phosphate
  modified_base 12: mod_base = OTHER; note = 2'-O-methyladenosine-3'-phosphate
  modified_base 13: mod_base = OTHER; note = 2'-O-methylcytidine-3'-phosphate
  modified_base 14: mod_base = OTHER; note = 2'-fluoroadenosine-3'-phosphate
  modified_base 15: mod_base = OTHER; note = 2'-O-methylguanosine-3'-phosphate
  modified_base 16: mod_base = OTHER; note = 2'-fluoroguanosine-3'-phosphate
  modified_base 17: mod_base = OTHER; note = 2'-O-methyluridine-3'-phosphate
  modified_base 18: mod_base = OTHER; note = 2'-fluorocytidine-3'-phosphate
  modified_base 19: mod_base = OTHER; note = 2'-O-methyluridine-3'-phosphate
  modified_base 20: mod_base = OTHER; note = 2'-fluoroadenosine-3'-phosphate
  modified_base 21: mod_base = OTHER; note = 2'-O-methylguanosine-3'-phosphorothioate
  modified_base 22: mod_base = OTHER; note = 2'-fluoroadenosine-3'-phosphorothioate
  modified_base 23: mod_base = OTHER; note = 2'-O-methyladenosine-3'-phosphate
acaaaagcaaaacaggtctagaa

SEQ ID NO: 445 - RNA, 21 nt, synthetic construct
  source 1..21: mol_type = other RNA; note = Description of Artificial Sequence: Synthetic oligonucleotide
  modified_base 1: mod_base = OTHER; note = 2'-O-methylcytidine-3'-phosphate
  modified_base 2: mod_base = OTHER; note = 2'-O-methyluridine-3'-phosphate
  modified_base 3: mod_base = OTHER; note = 2'-fluoroadenosine-3'-phosphate
  modified_base 4: mod_base = OTHER; note = 2'-O-methylguanosine-3'-phosphate
  modified_base 5: mod_base = OTHER; note = 2'-fluoroadenosine-3'-phosphate
  modified_base 6: mod_base = OTHER; note = 2'-O-methylcytidine-3'-phosphate
  modified_base 7: mod_base = OTHER; note = 2'-fluorocytidine-3'-phosphate
  modified_base 8: mod_base = OTHER; note = 2'-O-methyluridine-3'-phosphate
  modified_base 9: mod_base = OTHER; note = 2'-fluoroguanosine-3'-phosphate
  modified_base 10: mod_base = OTHER; note = 2'-fluorouridine-3'-phosphate
  modified_base 11: mod_base = OTHER; note = 2'-fluorouridine-3'-phosphate
  modified_base 12: mod_base = OTHER; note = 2'-O-methyluridine-3'-phosphate
  modified_base 13: mod_base = OTHER; note = 2'-fluorouridine-3'-phosphate
  modified_base 14: mod_base = OTHER; note = 2'-O-methylguanosine-3'-phosphate
  modified_base 15: mod_base = OTHER; note = 2'-fluorocytidine-3'-phosphate
  modified_base 16: mod_base = OTHER; note = 2'-O-methyluridine-3'-phosphate
  modified_base 17: mod_base = OTHER; note = 2'-fluorouridine-3'-phosphate
  modified_base 18: mod_base = OTHER; note = 2'-O-methyluridine-3'-phosphate
  modified_base 19: mod_base = OTHER; note = 2'-fluorouridine-3'-phosphate
  modified_base 20: mod_base = OTHER; note = 2'-O-methylguanosine-3'-phosphate
  modified_base 21: mod_base = OTHER; note = 2'-fluorouridine-3'-phosphate N-[tris(GalNAc-alkyl)-amidodecanoyl)]-4-hydroxyprolinol Hyp-(GalNAc-alkyl)3
ctagacctgttttgcttttgt

SEQ ID NO: 446 - RNA, 23 nt, synthetic construct
  source 1..23: mol_type = other RNA; note = Description of Artificial Sequence: Synthetic oligonucleotide
  modified_base 2: mod_base = OTHER; note = 2'-fluorocytidine-3'-phosphate
  modified_base 3: mod_base = OTHER; note = 2'-O-methyladenosine-3'-phosphate
  modified_base 4: mod_base = OTHER; note = 2'-fluoroadenosine-3'-phosphate
  modified_base 5: mod_base = OTHER; note = 2'-O-methyladenosine-3'-phosphate
  modified_base 6: mod_base = OTHER; note = 2'-fluoroadenosine-3'-phosphate
  modified_base 7: mod_base = OTHER; note = 2'-O-methylguanosine-3'-phosphate
  modified_base 8: mod_base = OTHER; note = 2'-fluorocytidine-3'-phosphate
  modified_base 9: mod_base = OTHER; note = 2'-O-methyladenosine-3'-phosphate
  modified_base 10: mod_base = OTHER; note = 2'-fluoroadenosine-3'-phosphate
  modified_base 11: mod_base = OTHER; note = 2'-O-methyladenosine-3'-phosphate
  modified_base 12: mod_base = OTHER; note = 2'-O-methyladenosine-3'-phosphate
  modified_base 13: mod_base = OTHER; note = 2'-O-methylcytidine-3'-phosphate
  modified_base 14: mod_base = OTHER; note = 2'-fluoroadenosine-3'-phosphate
  modified_base 15: mod_base = OTHER; note = 2'-O-methylguanosine-3'-phosphate
  modified_base 16: mod_base = OTHER; note = 2'-fluoroguanosine-3'-phosphate
  modified_base 17: mod_base = OTHER; note = 2'-O-methyluridine-3'-phosphate
  modified_base 18: mod_base = OTHER; note = 2'-fluorocytidine-3'-phosphate
  modified_base 19: mod_base = OTHER; note = 2'-O-methyluridine-3'-phosphate
  modified_base 20: mod_base = OTHER; note = 2'-fluoroadenosine-3'-phosphate
  modified_base 21: mod_base = OTHER; note = 2'-O-methylguanosine-3'-phosphorothioate
  modified_base 22: mod_base = OTHER; note = 2'-fluoroadenosine-3'-phosphorothioate
  modified_base 23: mod_base = OTHER; note = 2'-O-methyladenosine-3'-phosphate
acaaaagcaaaacaggtctagaa

SEQ ID NO: 447 - RNA, 21 nt, synthetic construct
  source 1..21: mol_type = other RNA; note = Description of Artificial Sequence: Synthetic oligonucleotide
  modified_base 1: mod_base = OTHER; note = 2'-fluorocytidine-3'-phosphate
  modified_base 2: mod_base = OTHER; note = 2'-O-methyluridine-3'-phosphate
  modified_base 3: mod_base = OTHER; note = 2'-fluoroadenosine-3'-phosphate
  modified_base 4: mod_base = OTHER; note = 2'-O-methylguanosine-3'-phosphate
  modified_base 5: mod_base = OTHER; note = 2'-fluoroadenosine-3'-phosphate
  modified_base 6: mod_base = OTHER; note = 2'-O-methylcytidine-3'-phosphate
  modified_base 7: mod_base = OTHER; note = 2'-fluorocytidine-3'-phosphate
  modified_base 8: mod_base = OTHER; note = 2'-O-methyluridine-3'-phosphate
  modified_base 9: mod_base = OTHER; note = 2'-fluoroguanosine-3'-phosphate
  modified_base 10: mod_base = OTHER; note = 2'-fluorouridine-3'-phosphate
  modified_base 11: mod_base = OTHER; note = 2'-fluorouridine-3'-phosphate
  modified_base 12: mod_base = OTHER; note = 2'-O-methyluridine-3'-phosphate
  modified_base 13: mod_base = OTHER; note = 2'-fluorouridine-3'-phosphate
  modified_base 14: mod_base = OTHER; note = 2'-O-methylguanosine-3'-phosphate
  modified_base 15: mod_base = OTHER; note = 2'-fluorocytidine-3'-phosphate
  modified_base 16: mod_base = OTHER; note = 2'-O-methyluridine-3'-phosphate
  modified_base 17: mod_base = OTHER; note = 2'-fluorouridine-3'-phosphate
  modified_base 18: mod_base = OTHER; note = 2'-O-methyluridine-3'-phosphate
  modified_base 19: mod_base = OTHER; note = 2'-fluorouridine-3'-phosphate
  modified_base 20: mod_base = OTHER; note = 2'-O-methylguanosine-3'-phosphate
  modified_base 21: mod_base = OTHER; note = 2'-fluorouridine-3'-phosphate N-[tris(GalNAc-alkyl)-amidodecanoyl)]-4-hydroxyprolinol Hyp-(GalNAc-alkyl)3
ctagacctgttttgcttttgt

SEQ ID NO: 448 - RNA, 23 nt, synthetic construct
  source 1..23: mol_type = other RNA; note = Description of Artificial Sequence: Synthetic oligonucleotide
  modified_base 2: mod_base = OTHER; note = 2'-fluorocytidine-3'-phosphate
  modified_base 3: mod_base = OTHER; note = 2'-O-methyladenosine-3'-phosphate
  modified_base 4: mod_base = OTHER; note = 2'-fluoroadenosine-3'-phosphate
  modified_base 5: mod_base = OTHER; note = 2'-O-methyladenosine-3'-phosphate
  modified_base 6: mod_base = OTHER; note = 2'-fluoroadenosine-3'-phosphate
  modified_base 7: mod_base = OTHER; note = 2'-O-methylguanosine-3'-phosphate
  modified_base 8: mod_base = OTHER; note = 2'-fluorocytidine-3'-phosphate
  modified_base 9: mod_base = OTHER; note = 2'-O-methyladenosine-3'-phosphate
  modified_base 10: mod_base = OTHER; note = 2'-fluoroadenosine-3'-phosphate
  modified_base 11: mod_base = OTHER; note = 2'-O-methyladenosine-3'-phosphate
  modified_base 12: mod_base = OTHER; note = 2'-O-methyladenosine-3'-phosphate
  modified_base 13: mod_base = OTHER; note = 2'-O-methylcytidine-3'-phosphate
  modified_base 14: mod_base = OTHER; note = 2'-fluoroadenosine-3'-phosphate
  modified_base 15: mod_base = OTHER; note = 2'-O-methylguanosine-3'-phosphate
  modified_base 16: mod_base = OTHER; note = 2'-fluoroguanosine-3'-phosphate
  modified_base 17: mod_base = OTHER; note = 2'-O-methyluridine-3'-phosphate
  modified_base 18: mod_base = OTHER; note = 2'-fluorocytidine-3'-phosphate
  modified_base 19: mod_base = OTHER; note = 2'-O-methyluridine-3'-phosphate
  modified_base 20: mod_base = OTHER; note = 2'-fluoroadenosine-3'-phosphate
  modified_base 21: mod_base = OTHER; note = 2'-O-methylguanosine-3'-phosphorothioate
  modified_base 22: mod_base = OTHER; note = 2'-fluoroadenosine-3'-phosphorothioate
  modified_base 23: mod_base = OTHER; note = 2'-O-methyladenosine-3'-phosphate
acaaaagcaaaacaggtctagaa

SEQ ID NO: 449 - RNA, 21 nt, synthetic construct
  source 1..21: mol_type = other RNA; note = Description of Artificial Sequence: Synthetic oligonucleotide
  modified_base 1: mod_base = OTHER; note = inverted cytidine-5'-phosphate
  modified_base 2: mod_base = OTHER; note = 2'-O-methyluridine-3'-phosphate
  modified_base 3: mod_base = OTHER; note = 2'-fluoroadenosine-3'-phosphate
  modified_base 4: mod_base = OTHER; note = 2'-O-methylguanosine-3'-phosphate
  modified_base 5: mod_base = OTHER; note = 2'-fluoroadenosine-3'-phosphate
  modified_base 6: mod_base = OTHER; note = 2'-O-methylcytidine-3'-phosphate
  modified_base 7: mod_base = OTHER; note = 2'-fluorocytidine-3'-phosphate
  modified_base 8: mod_base = OTHER; note = 2'-O-methyluridine-3'-phosphate
  modified_base 9: mod_base = OTHER; note = 2'-fluoroguanosine-3'-phosphate
  modified_base 10: mod_base = OTHER; note = 2'-fluorouridine-3'-phosphate
  modified_base 11: mod_base = OTHER; note = 2'-fluorouridine-3'-phosphate
  modified_base 12: mod_base = OTHER; note = 2'-O-methyluridine-3'-phosphate
  modified_base 13: mod_base = OTHER; note = 2'-fluorouridine-3'-phosphate
  modified_base 14: mod_base = OTHER; note = 2'-O-methylguanosine-3'-phosphate
  modified_base 15: mod_base = OTHER; note = 2'-fluorocytidine-3'-phosphate
  modified_base 16: mod_base = OTHER; note = 2'-O-methyluridine-3'-phosphate
  modified_base 17: mod_base = OTHER; note = 2'-fluorouridine-3'-phosphate
  modified_base 18: mod_base = OTHER; note = 2'-O-methyluridine-3'-phosphate
  modified_base 19: mod_base = OTHER; note = 2'-fluorouridine-3'-phosphate
  modified_base 20: mod_base = OTHER; note = 2'-O-methylguanosine-3'-phosphate
  modified_base 21: mod_base = OTHER; note = 2'-fluorouridine-3'-phosphate N-[tris(GalNAc-alkyl)-amidodecanoyl)]-4-hydroxyprolinol Hyp-(GalNAc-alkyl)3
ctagacctgttttgcttttgt

SEQ ID NO: 450 - RNA, 23 nt, synthetic construct
  source 1..23: mol_type = other RNA; note = Description of Artificial Sequence: Synthetic oligonucleotide
  modified_base 1: mod_base = OTHER; note = inverted adenosine-5'-phosphate
  modified_base 2: mod_base = OTHER; note = 2'-fluorocytidine-3'-phosphate
  modified_base 3: mod_base = OTHER; note = 2'-O-methyladenosine-3'-phosphate
  modified_base 4: mod_base = OTHER; note = 2'-fluoroadenosine-3'-phosphate
  modified_base 5: mod_base = OTHER; note = 2'-O-methyladenosine-3'-phosphate
  modified_base 6: mod_base = OTHER; note = 2'-fluoroadenosine-3'-phosphate
  modified_base 7: mod_base = OTHER; note = 2'-O-methylguanosine-3'-phosphate
  modified_base 8: mod_base = OTHER; note = 2'-fluorocytidine-3'-phosphate
  modified_base 9: mod_base = OTHER; note = 2'-O-methyladenosine-3'-phosphate
  modified_base 10: mod_base = OTHER; note = 2'-fluoroadenosine-3'-phosphate
  modified_base 11: mod_base = OTHER; note = 2'-O-methyladenosine-3'-phosphate
  modified_base 12: mod_base = OTHER; note = 2'-O-methyladenosine-3'-phosphate
  modified_base 13: mod_base = OTHER; note = 2'-O-methylcytidine-3'-phosphate
  modified_base 14: mod_base = OTHER; note = 2'-fluoroadenosine-3'-phosphate
  modified_base 15: mod_base = OTHER; note = 2'-O-methylguanosine-3'-phosphate
  modified_base 16: mod_base = OTHER; note = 2'-fluoroguanosine-3'-phosphate
  modified_base 17: mod_base = OTHER; note = 2'-O-methyluridine-3'-phosphate
  modified_base 18: mod_base = OTHER; note = 2'-fluorocytidine-3'-phosphate
  modified_base 19: mod_base = OTHER; note = 2'-O-methyluridine-3'-phosphate
  modified_base 20: mod_base = OTHER; note = 2'-fluoroadenosine-3'-phosphate
  modified_base 21: mod_base = OTHER; note = 2'-O-methylguanosine-3'-phosphorothioate
  modified_base 22: mod_base = OTHER; note = 2'-fluoroadenosine-3'-phosphorothioate
  modified_base 23: mod_base = OTHER; note = inverted adenosine-5'-phosphate
acaaaagcaaaacaggtctagaa

SEQ ID NO: 451 - RNA, 21 nt, synthetic construct
  source 1..21: mol_type = other RNA; note = Description of Artificial Sequence: Synthetic oligonucleotide
  modified_base 1: mod_base = OTHER; note = inverted cytidine-5'-phosphate
  modified_base 2: mod_base = OTHER; note = 2'-O-methyluridine-3'-phosphate
  modified_base 3: mod_base = OTHER; note = 2'-fluoroadenosine-3'-phosphate
  modified_base 4: mod_base = OTHER; note = 2'-O-methylguanosine-3'-phosphate
  modified_base 5: mod_base = OTHER; note = 2'-fluoroadenosine-3'-phosphate
  modified_base 6: mod_base = OTHER; note = 2'-O-methylcytidine-3'-phosphate
  modified_base 7: mod_base = OTHER; note = 2'-fluorocytidine-3'-phosphate
  modified_base 8: mod_base = OTHER; note = 2'-O-methyluridine-3'-phosphate
  modified_base 9: mod_base = OTHER; note = 2'-fluoroguanosine-3'-phosphate
  modified_base 10: mod_base = OTHER; note = 2'-fluorouridine-3'-phosphate
  modified_base 11: mod_base = OTHER; note = 2'-fluorouridine-3'-phosphate
  modified_base 12: mod_base = OTHER; note = 2'-O-methyluridine-3'-phosphate
  modified_base 13: mod_base = OTHER; note = 2'-fluorouridine-3'-phosphate
  modified_base 14: mod_base = OTHER; note = 2'-O-methylguanosine-3'-phosphate
  modified_base 15: mod_base = OTHER; note = 2'-fluorocytidine-3'-phosphate
  modified_base 16: mod_base = OTHER; note = 2'-O-methyluridine-3'-phosphate
  modified_base 17: mod_base = OTHER; note = 2'-fluorouridine-3'-phosphate
  modified_base 18: mod_base = OTHER; note = 2'-O-methyluridine-3'-phosphate
  modified_base 19: mod_base = OTHER; note = 2'-fluorouridine-3'-phosphate
  modified_base 20: mod_base = OTHER; note = 2'-O-methylguanosine-3'-phosphate
  modified_base 21: mod_base = OTHER; note = 2'-fluorouridine-3'-phosphate N-[tris(GalNAc-alkyl)-amidodecanoyl)]-4-hydroxyprolinol Hyp-(GalNAc-alkyl)3
ctagacctgttttgcttttgt

SEQ ID NO: 452 - RNA, 23 nt, synthetic construct
  source 1..23: mol_type = other RNA; note = Description of Artificial Sequence: Synthetic oligonucleotide
  modified_base 1: mod_base = OTHER; note = 2'-O-methyladenosine-3'-phosphate
  modified_base 2: mod_base = OTHER; note = 2'-fluorocytidine-3'-phosphate
  modified_base 3: mod_base = OTHER; note = 2'-O-methyladenosine-3'-phosphate
  modified_base 4: mod_base = OTHER; note = 2'-fluoroadenosine-3'-phosphate
  modified_base 5: mod_base = OTHER; note = 2'-O-methyladenosine-3'-phosphate
  modified_base 6: mod_base = OTHER; note = 2'-fluoroadenosine-3'-phosphate
  modified_base 7: mod_base = OTHER; note = 2'-O-methylguanosine-3'-phosphate
  modified_base 8: mod_base = OTHER; note = 2'-fluorocytidine-3'-phosphate
  modified_base 9: mod_base = OTHER; note = 2'-O-methyladenosine-3'-phosphate
  modified_base 10: mod_base = OTHER; note = 2'-fluoroadenosine-3'-phosphate
  modified_base 11: mod_base = OTHER; note = 2'-O-methyladenosine-3'-phosphate
  modified_base 12: mod_base = OTHER; note = 2'-O-methyladenosine-3'-phosphate
  modified_base 13: mod_base = OTHER; note = 2'-O-methylcytidine-3'-phosphate
  modified_base 14: mod_base = OTHER; note = 2'-fluoroadenosine-3'-phosphate
  modified_base 15: mod_base = OTHER; note = 2'-O-methylguanosine-3'-phosphate
  modified_base 16: mod_base = OTHER; note = 2'-fluoroguanosine-3'-phosphate
  modified_base 17: mod_base = OTHER; note = 2'-O-methyluridine-3'-phosphate
  modified_base 18: mod_base = OTHER; note = 2'-fluorocytidine-3'-phosphate
  modified_base 19: mod_base = OTHER; note = 2'-O-methyluridine-3'-phosphate
  modified_base 20: mod_base = OTHER; note = 2'-fluoroadenosine-3'-phosphate
  modified_base 21: mod_base = OTHER; note = 2'-O-methylguanosine-3'-phosphorothioate
  modified_base 22: mod_base = OTHER; note = 2'-fluoroadenosine-3'-phosphorothioate
  modified_base 23: mod_base = OTHER; note = inverted adenosine-5'-phosphate
acaaaagcaaaacaggtctagaa

SEQ ID NO: 453 - RNA, 21 nt, synthetic construct
  source 1..21: mol_type = other RNA; note = Description of Artificial Sequence: Synthetic oligonucleotide
  modified_base 1: mod_base = OTHER; note = inverted cytidine-5'-phosphate
  modified_base 2: mod_base = OTHER; note = 2'-O-methyluridine-3'-phosphate
  modified_base 3: mod_base = OTHER; note = 2'-fluoroadenosine-3'-phosphate
  modified_base 4: mod_base = OTHER; note = 2'-O-methylguanosine-3'-phosphate
  modified_base 5: mod_base = OTHER; note = 2'-fluoroadenosine-3'-phosphate
  modified_base 6: mod_base = OTHER; note = 2'-O-methylcytidine-3'-phosphate
  modified_base 7: mod_base = OTHER; note = 2'-fluorocytidine-3'-phosphate
  modified_base 8: mod_base = OTHER; note = 2'-O-methyluridine-3'-phosphate
  modified_base 9: mod_base = OTHER; note = 2'-fluoroguanosine-3'-phosphate
  modified_base 10: mod_base = OTHER; note = 2'-fluorouridine-3'-phosphate
  modified_base 11: mod_base = OTHER; note = 2'-fluorouridine-3'-phosphate
  modified_base 12: mod_base = OTHER; note = 2'-O-methyluridine-3'-phosphate
  modified_base 13: mod_base = OTHER; note = 2'-fluorouridine-3'-phosphate
  modified_base 14: mod_base = OTHER; note = 2'-O-methylguanosine-3'-phosphate
  modified_base 15: mod_base = OTHER; note = 2'-fluorocytidine-3'-phosphate
  modified_base 16: mod_base = OTHER; note = 2'-O-methyluridine-3'-phosphate
  modified_base 17: mod_base = OTHER; note = 2'-fluorouridine-3'-phosphate
  modified_base 18: mod_base = OTHER; note = 2'-O-methyluridine-3'-phosphate
  modified_base 19: mod_base = OTHER; note = 2'-fluorouridine-3'-phosphate
  modified_base 20: mod_base = OTHER; note = 2'-O-methylguanosine-3'-phosphate
  modified_base 21: mod_base = OTHER; note = 2'-fluorouridine-3'-phosphate N-[tris(GalNAc-alkyl)-amidodecanoyl)]-4-hydroxyprolinol Hyp-(GalNAc-alkyl)3
ctagacctgttttgcttttgt

SEQ ID NO: 454 - RNA, 23 nt, synthetic construct
  source 1..23: mol_type = other RNA; note = Description of Artificial Sequence: Synthetic oligonucleotide
  modified_base 1: mod_base = OTHER; note = 2'-O-methyladenosine-3'-phosphate
  modified_base 2: mod_base = OTHER; note = 2'-O-methylcytidine-3'-phosphate
  modified_base 3: mod_base = OTHER; note = 2'-O-methyladenosine-3'-phosphate
  modified_base 4: mod_base = OTHER; note = 2'-fluoroadenosine-3'-phosphate
  modified_base 5: mod_base = OTHER; note = 2'-O-methyladenosine-3'-phosphate
  modified_base 6: mod_base = OTHER; note = 2'-fluoroadenosine-3'-phosphate
  modified_base 7: mod_base = OTHER; note = 2'-O-methylguanosine-3'-phosphate
  modified_base 8: mod_base = OTHER; note = 2'-O-methylcytidine-3'-phosphate
  modified_base 9: mod_base = OTHER; note = 2'-O-methyladenosine-3'-phosphate
  modified_base 10: mod_base = OTHER; note = 2'-fluoroadenosine-3'-phosphate
  modified_base 11: mod_base = OTHER; note = 2'-O-methyladenosine-3'-phosphate
  modified_base 12: mod_base = OTHER; note = 2'-O-methyladenosine-3'-phosphate
  modified_base 13: mod_base = OTHER; note = 2'-O-methylcytidine-3'-phosphate
  modified_base 14: mod_base = OTHER; note = 2'-fluoroadenosine-3'-phosphate
  modified_base 15: mod_base = OTHER; note = 2'-O-methylguanosine-3'-phosphate
  modified_base 16: mod_base = OTHER; note = 2'-fluoroguanosine-3'-phosphate
  modified_base 17: mod_base = OTHER; note = 2'-O-methyluridine-3'-phosphate
  modified_base 18: mod_base = OTHER; note = 2'-fluorocytidine-3'-phosphate
  modified_base 19: mod_base = OTHER; note = 2'-O-methyluridine-3'-phosphate
  modified_base 20: mod_base = OTHER; note = 2'-fluoroadenosine-3'-phosphate
  modified_base 21: mod_base = OTHER; note = 2'-O-methylguanosine-3'-phosphorothioate
  modified_base 22: mod_base = OTHER; note = 2'-fluoroadenosine-3'-phosphorothioate
  modified_base 23: mod_base = OTHER; note = inverted adenosine-5'-phosphate
acaaaagcaaaacaggtctagaa

SEQ ID NO: 455 - RNA, 21 nt, synthetic construct
  source 1..21: mol_type = other RNA; note = Description of Artificial Sequence: Synthetic oligonucleotide
  modified_base 1: mod_base = OTHER; note = inverted cytidine-5'-phosphate
  modified_base 2: mod_base = OTHER; note = 2'-O-methyluridine-3'-phosphate
  modified_base 3: mod_base = OTHER; note = 2'-fluoroadenosine-3'-phosphate
  modified_base 4: mod_base = OTHER; note = 2'-O-methylguanosine-3'-phosphate
  modified_base 5: mod_base = OTHER; note = 2'-fluoroadenosine-3'-phosphate
  modified_base 6: mod_base = OTHER; note = 2'-O-methylcytidine-3'-phosphate
  modified_base 7: mod_base = OTHER; note = 2'-fluorocytidine-3'-phosphate
  modified_base 8: mod_base = OTHER; note = 2'-O-methyluridine-3'-phosphate
  modified_base 9: mod_base = OTHER; note = 2'-fluoroguanosine-3'-phosphate
  modified_base 10: mod_base = OTHER; note = 2'-fluorouridine-3'-phosphate
  modified_base 11: mod_base = OTHER; note = 2'-fluorouridine-3'-phosphate
  modified_base 12: mod_base = OTHER; note = 2'-O-methyluridine-3'-phosphate
  modified_base 13: mod_base = OTHER; note = 2'-fluorouridine-3'-phosphate
  modified_base 14: mod_base = OTHER; note = 2'-O-methylguanosine-3'-phosphate
  modified_base 15: mod_base = OTHER; note = 2'-fluorocytidine-3'-phosphate
  modified_base 16: mod_base = OTHER; note = 2'-O-methyluridine-3'-phosphate
  modified_base 17: mod_base = OTHER; note = 2'-fluorouridine-3'-phosphate
  modified_base 18: mod_base = OTHER; note = 2'-O-methyluridine-3'-phosphate
  modified_base 19: mod_base = OTHER; note = 2'-O-methyluridine-3'-phosphate
  modified_base 20: mod_base = OTHER; note = 2'-O-methylguanosine-3'-phosphate
  modified_base 21: mod_base = OTHER; note = 2'-fluorouridine-3'-phosphate N-[tris(GalNAc-alkyl)-amidodecanoyl)]-4-hydroxyprolinol Hyp-(GalNAc-alkyl)3
ctagacctgttttgcttttgt

SEQ ID NO: 456 - RNA, 23 nt, synthetic construct
  source 1..23: mol_type = other RNA; note = Description of Artificial Sequence: Synthetic oligonucleotide
  modified_base 1: mod_base = OTHER; note = 2'-O-methyladenosine-3'-phosphate
  modified_base 2: mod_base = OTHER; note = 2'-O-methylcytidine-3'-phosphate
  modified_base 3: mod_base = OTHER; note = 2'-O-methyladenosine-3'-phosphate
  modified_base 4: mod_base = OTHER; note = 2'-fluoroadenosine-3'-phosphate
  modified_base 5: mod_base = OTHER; note = 2'-O-methyladenosine-3'-phosphate
  modified_base 6: mod_base = OTHER; note = 2'-fluoroadenosine-3'-phosphate
  modified_base 7: mod_base = OTHER; note = 2'-O-methylguanosine-3'-phosphate
  modified_base 8: mod_base = OTHER; note = 2'-O-methylcytidine-3'-phosphate
  modified_base 9: mod_base = OTHER; note = 2'-O-methyladenosine-3'-phosphate
  modified_base 10: mod_base = OTHER; note = 2'-fluoroadenosine-3'-phosphate
  modified_base 11: mod_base = OTHER; note = 2'-O-methyladenosine-3'-phosphate
  modified_base 12: mod_base = OTHER; note = 2'-O-methyladenosine-3'-phosphate
  modified_base 13: mod_base = OTHER; note = 2'-O-methylcytidine-3'-phosphate
  modified_base 14: mod_base = OTHER; note = 2'-fluoroadenosine-3'-phosphate
  modified_base 15: mod_base = OTHER; note = 2'-O-methylguanosine-3'-phosphate
  modified_base 16: mod_base = OTHER; note = 2'-fluoroguanosine-3'-phosphate
  modified_base 17: mod_base = OTHER; note = 2'-O-methyluridine-3'-phosphate
  modified_base 18: mod_base = OTHER; note = 2'-fluorocytidine-3'-phosphate
  modified_base 19: mod_base = OTHER; note = 2'-O-methyluridine-3'-phosphate
  modified_base 20: mod_base = OTHER; note = 2'-fluoroadenosine-3'-phosphate
  modified_base 21: mod_base = OTHER; note = 2'-O-methylguanosine-3'-phosphorothioate
  modified_base 22: mod_base = OTHER; note = 2'-fluoroadenosine-3'-phosphorothioate
  modified_base 23: mod_base = OTHER; note = inverted adenosine-5'-phosphate
acaaaagcaaaacaggtctagaa

SEQ ID NO: 457 - RNA, 21 nt, synthetic construct
  source 1..21: mol_type = other RNA; note = Description of Artificial Sequence: Synthetic oligonucleotide
  modified_base 1: mod_base = OTHER; note = inverted cytidine-5'-phosphate
  modified_base 2: mod_base = OTHER; note = 2'-O-methyluridine-3'-phosphate
  modified_base 3: mod_base = OTHER; note = 2'-fluoroadenosine-3'-phosphate
  modified_base 4: mod_base = OTHER; note = 2'-O-methylguanosine-3'-phosphate
  modified_base 5: mod_base = OTHER; note = 2'-fluoroadenosine-3'-phosphate
  modified_base 6: mod_base = OTHER; note = 2'-O-methylcytidine-3'-phosphate
  modified_base 7: mod_base = OTHER; note = 2'-fluorocytidine-3'-phosphate
  modified_base 8: mod_base = OTHER; note = 2'-O-methyluridine-3'-phosphate
  modified_base 9: mod_base = OTHER; note = 2'-fluoroguanosine-3'-phosphate
  modified_base 10: mod_base = OTHER; note = 2'-fluorouridine-3'-phosphate
  modified_base 11: mod_base = OTHER; note = 2'-fluorouridine-3'-phosphate
  modified_base 12: mod_base = OTHER; note = 2'-O-methyluridine-3'-phosphate
  modified_base 13: mod_base = OTHER; note = 2'-fluorouridine-3'-phosphate
  modified_base 14: mod_base = OTHER; note = 2'-O-methylguanosine-3'-phosphate
  modified_base 15: mod_base = OTHER; note = 2'-fluorocytidine-3'-phosphate
  modified_base 16: mod_base = OTHER; note = 2'-O-methyluridine-3'-phosphate
  modified_base 17: mod_base = OTHER; note = 2'-fluorouridine-3'-phosphate
  modified_base 18: mod_base = OTHER; note = 2'-O-methyluridine-3'-phosphate
  modified_base 19: mod_base = OTHER; note = 2'-O-methyluridine-3'-phosphate
  modified_base 20: mod_base = OTHER; note = 2'-O-methylguanosine-3'-phosphate
  modified_base 21: mod_base = OTHER; note = 2'-fluorouridine-3'-phosphate N-[tris(GalNAc-alkyl)-amidodecanoyl)]-4-hydroxyprolinol Hyp-(GalNAc-alkyl)3
ctagacctgttttgcttttgt

SEQ ID NO: 458 - RNA, 23 nt, synthetic construct
  source 1..23: mol_type = other RNA; note = Description of Artificial Sequence: Synthetic oligonucleotide
  modified_base 1: mod_base = OTHER; note = inverted adenosine-5'-phosphate
  modified_base 2: mod_base = OTHER; note = 2'-O-methylcytidine-3'-phosphate
  modified_base 3: mod_base = OTHER; note = 2'-O-methyladenosine-3'-phosphate
  modified_base 4: mod_base = OTHER; note = 2'-fluoroadenosine-3'-phosphate
  modified_base 5: mod_base = OTHER; note = 2'-O-methyladenosine-3'-phosphate
  modified_base 6: mod_base = OTHER; note = 2'-fluoroadenosine-3'-phosphate
  modified_base 7: mod_base = OTHER; note = 2'-O-methylguanosine-3'-phosphate
  modified_base 8: mod_base = OTHER; note = 2'-O-methylcytidine-3'-phosphate
  modified_base 9: mod_base = OTHER; note = 2'-O-methyladenosine-3'-phosphate
  modified_base 10: mod_base = OTHER; note = 2'-fluoroadenosine-3'-phosphate
  modified_base 11: mod_base = OTHER; note = 2'-O-methyladenosine-3'-phosphate
  modified_base 12: mod_base = OTHER; note = 2'-O-methyladenosine-3'-phosphate
  modified_base 13: mod_base = OTHER; note = 2'-O-methylcytidine-3'-phosphate
  modified_base 14: mod_base = OTHER; note = 2'-fluoroadenosine-3'-phosphate
  modified_base 15: mod_base = OTHER; note = 2'-O-methylguanosine-3'-phosphate
  modified_base 16: mod_base = OTHER; note = 2'-fluoroguanosine-3'-phosphate
  modified_base 17: mod_base = OTHER; note = 2'-O-methyluridine-3'-phosphate
  modified_base 18: mod_base = OTHER; note = 2'-fluorocytidine-3'-phosphate
  modified_base 19: mod_base = OTHER; note = 2'-O-methyluridine-3'-phosphate
  modified_base 20: mod_base = OTHER; note = 2'-fluoroadenosine-3'-phosphate
  modified_base 21: mod_base = OTHER; note = 2'-O-methylguanosine-3'-phosphorothioate
  modified_base 22: mod_base = OTHER; note = 2'-fluoroadenosine-3'-phosphorothioate
  modified_base 23: mod_base = OTHER; note = inverted adenosine-5'-phosphate
acaaaagcaaaacaggtctagaa

SEQ ID NO: 459 - RNA, 21 nt, synthetic construct
  source 1..21: mol_type = other RNA; note = Description of Artificial Sequence: Synthetic oligonucleotide
  modified_base 1: mod_base = OTHER; note = beta-L-cytidine-3'-phosphate
  modified_base 2: mod_base = OTHER; note = 2'-O-methyluridine-3'-phosphate
  modified_base 3: mod_base = OTHER; note = 2'-fluoroadenosine-3'-phosphate
  modified_base 4: mod_base = OTHER; note = 2'-O-methylguanosine-3'-phosphate
  modified_base 5: mod_base = OTHER; note = 2'-fluoroadenosine-3'-phosphate
  modified_base 6: mod_base = OTHER; note = 2'-O-methylcytidine-3'-phosphate
  modified_base 7: mod_base = OTHER; note = 2'-fluorocytidine-3'-phosphate
  modified_base 8: mod_base = OTHER; note = 2'-O-methyluridine-3'-phosphate
  modified_base 9: mod_base = OTHER; note = 2'-fluoroguanosine-3'-phosphate
  modified_base 10: mod_base = OTHER; note = 2'-fluorouridine-3'-phosphate
  modified_base 11: mod_base = OTHER; note = 2'-fluorouridine-3'-phosphate
  modified_base 12: mod_base = OTHER; note = 2'-O-methyluridine-3'-phosphate
  modified_base 13: mod_base = OTHER; note = 2'-fluorouridine-3'-phosphate
  modified_base 14: mod_base = OTHER; note = 2'-O-methylguanosine-3'-phosphate
  modified_base 15: mod_base = OTHER; note = 2'-fluorocytidine-3'-phosphate
  modified_base 16: mod_base = OTHER; note = 2'-O-methyluridine-3'-phosphate
  modified_base 17: mod_base = OTHER; note = 2'-fluorouridine-3'-phosphate
  modified_base 18: mod_base = OTHER; note = 2'-O-methyluridine-3'-phosphate
  modified_base 19: mod_base = OTHER; note = 2'-fluorouridine-3'-phosphate
  modified_base 20: mod_base = OTHER; note = 2'-O-methylguanosine-3'-phosphate
  modified_base 21: mod_base = OTHER; note = 2'-fluorouridine-3'-phosphate N-[tris(GalNAc-alkyl)-amidodecanoyl)]-4-hydroxyprolinol Hyp-(GalNAc-alkyl)3
ctagacctgttttgcttttgt

SEQ ID NO: 460 - RNA, 23 nt, synthetic construct
  source 1..23: mol_type = other RNA; note = Description of Artificial Sequence: Synthetic oligonucleotide
  modified_base 1: mod_base = OTHER; note = beta-L-adenosine-3'-phosphate
  modified_base 2: mod_base = OTHER; note = 2'-fluorocytidine-3'-phosphate
  modified_base 3: mod_base = OTHER; note = 2'-O-methyladenosine-3'-phosphate
  modified_base 4: mod_base = OTHER; note = 2'-fluoroadenosine-3'-phosphate
  modified_base 5: mod_base = OTHER; note = 2'-O-methyladenosine-3'-phosphate
  modified_base 6: mod_base = OTHER; note = 2'-fluoroadenosine-3'-phosphate
  modified_base 7: mod_base = OTHER; note = 2'-O-methylguanosine-3'-phosphate
  modified_base 8: mod_base = OTHER; note = 2'-fluorocytidine-3'-phosphate
  modified_base 9: mod_base = OTHER; note = 2'-O-methyladenosine-3'-phosphate
  modified_base 10: mod_base = OTHER; note = 2'-fluoroadenosine-3'-phosphate
  modified_base 11: mod_base = OTHER; note = 2'-O-methyladenosine-3'-phosphate
  modified_base 12: mod_base = OTHER; note = 2'-O-methyladenosine-3'-phosphate
  modified_base 13: mod_base = OTHER; note = 2'-O-methylcytidine-3'-phosphate
  modified_base 14: mod_base = OTHER; note = 2'-fluoroadenosine-3'-phosphate
  modified_base 15: mod_base = OTHER; note = 2'-O-methylguanosine-3'-phosphate
  modified_base 16: mod_base = OTHER; note = 2'-fluoroguanosine-3'-phosphate
  modified_base 17: mod_base = OTHER; note = 2'-O-methyluridine-3'-phosphate
  modified_base 18: mod_base = OTHER; note = 2'-fluorocytidine-3'-phosphate
  modified_base 19: mod_base = OTHER; note = 2'-O-methyluridine-3'-phosphate
  modified_base 20: mod_base = OTHER; note = 2'-fluoroadenosine-3'-phosphate
  modified_base 21: mod_base = OTHER; note = 2'-O-methylguanosine-3'-phosphorothioate
  modified_base 22: mod_base = OTHER; note = 2'-fluoroadenosine-3'-phosphorothioate
  modified_base 23: mod_base = OTHER; note = beta-L-adenosine-3'-phosphate
acaaaagcaaaacaggtctagaa

SEQ ID NO: 461 - RNA, 21 nt, synthetic construct
  source 1..21: mol_type = other RNA; note = Description of Artificial Sequence: Synthetic oligonucleotide
  modified_base 1: mod_base = OTHER; note = beta-L-cytidine-3'-phosphate
  modified_base 2: mod_base = OTHER; note = 2'-O-methyluridine-3'-phosphate
  modified_base 3: mod_base = OTHER; note = 2'-fluoroadenosine-3'-phosphate
  modified_base 4: mod_base = OTHER; note = 2'-O-methylguanosine-3'-phosphate
  modified_base 5: mod_base = OTHER; note = 2'-fluoroadenosine-3'-phosphate
  modified_base 6: mod_base = OTHER; note = 2'-O-methylcytidine-3'-phosphate
  modified_base 7: mod_base = OTHER; note = 2'-fluorocytidine-3'-phosphate
  modified_base 8: mod_base = OTHER; note = 2'-O-methyluridine-3'-phosphate
  modified_base 9: mod_base = OTHER; note = 2'-fluoroguanosine-3'-phosphate
  modified_base 10: mod_base = OTHER; note = 2'-fluorouridine-3'-phosphate
  modified_base 11: mod_base = OTHER; note = 2'-fluorouridine-3'-phosphate
  modified_base 12: mod_base = OTHER; note = 2'-O-methyluridine-3'-phosphate
  modified_base 13: mod_base = OTHER; note = 2'-fluorouridine-3'-phosphate
  modified_base 14: mod_base = OTHER; note = 2'-O-methylguanosine-3'-phosphate
  modified_base 15: mod_base = OTHER; note = 2'-fluorocytidine-3'-phosphate
  modified_base 16: mod_base = OTHER; note = 2'-O-methyluridine-3'-phosphate
  modified_base 17: mod_base = OTHER; note = 2'-fluorouridine-3'-phosphate
  modified_base 18: mod_base = OTHER; note = 2'-O-methyluridine-3'-phosphate
  modified_base 19: mod_base = OTHER; note = 2'-fluorouridine-3'-phosphate
  modified_base 20: mod_base = OTHER; note = 2'-O-methylguanosine-3'-phosphate
  modified_base 21: mod_base = OTHER; note = 2'-fluorouridine-3'-phosphate N-[tris(GalNAc-alkyl)-amidodecanoyl)]-4-hydroxyprolinol Hyp-(GalNAc-alkyl)3
ctagacctgttttgcttttgt

SEQ ID NO: 462 - RNA, 23 nt, synthetic construct
  source 1..23: mol_type = other RNA; note = Description of Artificial Sequence: Synthetic oligonucleotide
  modified_base 1: mod_base = OTHER; note = 2'-O-methyladenosine-3'-phosphate
  modified_base 2: mod_base = OTHER; note = 2'-fluorocytidine-3'-phosphate
  modified_base 3: mod_base = OTHER; note = 2'-O-methyladenosine-3'-phosphate
  modified_base 4: mod_base = OTHER; note = 2'-fluoroadenosine-3'-phosphate
  modified_base 5: mod_base = OTHER; note = 2'-O-methyladenosine-3'-phosphate
  modified_base 6: mod_base = OTHER; note = 2'-fluoroadenosine-3'-phosphate
  modified_base 7: mod_base = OTHER; note = 2'-O-methylguanosine-3'-phosphate
  modified_base 8: mod_base = OTHER; note = 2'-fluorocytidine-3'-phosphate
  modified_base 9: mod_base = OTHER; note = 2'-O-methyladenosine-3'-phosphate
  modified_base 10: mod_base = OTHER; note = 2'-fluoroadenosine-3'-phosphate
  modified_base 11: mod_base = OTHER; note = 2'-O-methyladenosine-3'-phosphate
  modified_base 12: mod_base = OTHER; note = 2'-O-methyladenosine-3'-phosphate
  modified_base 13: mod_base = OTHER; note = 2'-O-methylcytidine-3'-phosphate
  modified_base 14: mod_base = OTHER; note = 2'-fluoroadenosine-3'-phosphate
  modified_base 15: mod_base = OTHER; note = 2'-O-methylguanosine-3'-phosphate
  modified_base 16: mod_base = OTHER; note = 2'-fluoroguanosine-3'-phosphate
  modified_base 17: mod_base = OTHER; note = 2'-O-methyluridine-3'-phosphate
  modified_base 18: mod_base = OTHER; note = 2'-fluorocytidine-3'-phosphate
  modified_base 19: mod_base = OTHER; note = 2'-O-methyluridine-3'-phosphate
  modified_base 20: mod_base = OTHER; note = 2'-fluoroadenosine-3'-phosphate
  modified_base 21: mod_base = OTHER; note = 2'-O-methylguanosine-3'-phosphorothioate
  modified_base 22: mod_base = OTHER; note = 2'-fluoroadenosine-3'-phosphorothioate
  modified_base 23: mod_base = OTHER; note = beta-L-adenosine-3'-phosphate
acaaaagcaaaacaggtctagaa

SEQ ID NO: 463 - RNA, 21 nt, synthetic construct
  source 1..21: mol_type = other RNA; note = Description of Artificial Sequence: Synthetic oligonucleotide
  modified_base 1: mod_base = OTHER; note = beta-L-cytidine-3'-phosphate
  modified_base 2: mod_base = OTHER; note = 2'-O-methyluridine-3'-phosphate
  modified_base 3: mod_base = OTHER; note = 2'-fluoroadenosine-3'-phosphate
  modified_base 4: mod_base = OTHER; note = 2'-O-methylguanosine-3'-phosphate
  modified_base 5: mod_base = OTHER; note = 2'-fluoroadenosine-3'-phosphate
  modified_base 6: mod_base = OTHER; note = 2'-O-methylcytidine-3'-phosphate
  modified_base 7: mod_base = OTHER; note = 2'-fluorocytidine-3'-phosphate
  modified_base 8: mod_base = OTHER; note = 2'-O-methyluridine-3'-phosphate
  modified_base 9: mod_base = OTHER; note = 2'-fluoroguanosine-3'-phosphate
  modified_base 10: mod_base = OTHER; note = 2'-fluorouridine-3'-phosphate
  modified_base 11: mod_base = OTHER; note = 2'-fluorouridine-3'-phosphate
  modified_base 12: mod_base = OTHER; note = 2'-O-methyluridine-3'-phosphate
  modified_base 13: mod_base = OTHER; note = 2'-fluorouridine-3'-phosphate
  modified_base 14: mod_base = OTHER; note = 2'-O-methylguanosine-3'-phosphate
  modified_base 15: mod_base = OTHER; note = 2'-fluorocytidine-3'-phosphate
  modified_base 16: mod_base = OTHER; note = 2'-O-methyluridine-3'-phosphate
  modified_base 17: mod_base = OTHER; note = 2'-fluorouridine-3'-phosphate
  modified_base 18: mod_base = OTHER; note = 2'-O-methyluridine-3'-phosphate
  modified_base 19: mod_base = OTHER; note = 2'-fluorouridine-3'-phosphate
  modified_base 20: mod_base = OTHER; note = 2'-O-methylguanosine-3'-phosphate
  modified_base 21: mod_base = OTHER; note = 2'-fluorouridine-3'-phosphate N-[tris(GalNAc-alkyl)-amidodecanoyl)]-4-hydroxyprolinol Hyp-(GalNAc-alkyl)3
ctagacctgttttgcttttgt

SEQ ID NO: 464 - RNA, 23 nt, synthetic construct
  source 1..23: mol_type = other RNA; note = Description of Artificial Sequence: Synthetic oligonucleotide
  modified_base 1: mod_base = OTHER; note = 2'-O-methyladenosine-3'-phosphate
  modified_base 2: mod_base = OTHER; note = 2'-O-methylcytidine-3'-phosphate
  modified_base 3: mod_base = OTHER; note = 2'-O-methyladenosine-3'-phosphate
  modified_base 4: mod_base = OTHER; note = 2'-fluoroadenosine-3'-phosphate
  modified_base 5: mod_base = OTHER; note = 2'-O-methyladenosine-3'-phosphate
  modified_base 6: mod_base = OTHER; note = 2'-fluoroadenosine-3'-phosphate
  modified_base 7: mod_base = OTHER; note = 2'-O-methylguanosine-3'-phosphate
  modified_base 8: mod_base = OTHER; note = 2'-O-methylcytidine-3'-phosphate
  modified_base 9: mod_base = OTHER; note = 2'-O-methyladenosine-3'-phosphate
  modified_base 10: mod_base = OTHER; note = 2'-fluoroadenosine-3'-phosphate
  modified_base 11: mod_base = OTHER; note = 2'-O-methyladenosine-3'-phosphate
  modified_base 12: mod_base = OTHER; note = 2'-O-methyladenosine-3'-phosphate
  modified_base 13: mod_base = OTHER; note = 2'-O-methylcytidine-3'-phosphate
  modified_base 14: mod_base = OTHER; note = 2'-fluoroadenosine-3'-phosphate
  modified_base 15: mod_base = OTHER; note = 2'-O-methylguanosine-3'-phosphate
  modified_base 16: mod_base = OTHER; note = 2'-fluoroguanosine-3'-phosphate
  modified_base 17: mod_base = OTHER; note = 2'-O-methyluridine-3'-phosphate
  modified_base 18: mod_base = OTHER; note = 2'-fluorocytidine-3'-phosphate
  modified_base 19: mod_base = OTHER; note = 2'-O-methyluridine-3'-phosphate
  modified_base 20: mod_base = OTHER; note = 2'-fluoroadenosine-3'-phosphate
  modified_base 21: mod_base = OTHER; note = 2'-O-methylguanosine-3'-phosphorothioate
  modified_base 22: mod_base = OTHER; note = 2'-fluoroadenosine-3'-phosphorothioate
  modified_base 23: mod_base = OTHER; note = beta-L-adenosine-3'-phosphate
acaaaagcaaaacaggtctagaa

SEQ ID NO: 465 - RNA, 21 nt, synthetic construct
  source 1..21: mol_type = other RNA; note = Description of Artificial Sequence: Synthetic oligonucleotide
  modified_base 1: mod_base = OTHER; note = beta-L-cytidine-3'-phosphate
  modified_base 2: mod_base = OTHER; note = 2'-O-methyluridine-3'-phosphate
  modified_base 3: mod_base = OTHER; note = 2'-fluoroadenosine-3'-phosphate
  modified_base 4: mod_base = OTHER; note = 2'-O-methylguanosine-3'-phosphate
  modified_base 5: mod_base = OTHER; note = 2'-fluoroadenosine-3'-phosphate
  modified_base 6: mod_base = OTHER; note = 2'-O-methylcytidine-3'-phosphate
  modified_base 7: mod_base = OTHER; note = 2'-fluorocytidine-3'-phosphate
  modified_base 8: mod_base = OTHER; note = 2'-O-methyluridine-3'-phosphate
  modified_base 9: mod_base = OTHER; note = 2'-fluoroguanosine-3'-phosphate
  modified_base 10: mod_base = OTHER; note = 2'-fluorouridine-3'-phosphate
  modified_base 11: mod_base = OTHER; note = 2'-fluorouridine-3'-phosphate
  modified_base 12: mod_base = OTHER; note = 2'-O-methyluridine-3'-phosphate
  modified_base 13: mod_base = OTHER; note = 2'-fluorouridine-3'-phosphate
  modified_base 14: mod_base = OTHER; note = 2'-O-methylguanosine-3'-phosphate
  modified_base 15: mod_base = OTHER; note = 2'-fluorocytidine-3'-phosphate
  modified_base 16: mod_base = OTHER; note = 2'-O-methyluridine-3'-phosphate
  modified_base 17: mod_base = OTHER; note = 2'-fluorouridine-3'-phosphate
  modified_base 18: mod_base = OTHER; note = 2'-O-methyluridine-3'-phosphate
  modified_base 19: mod_base = OTHER; note = 2'-O-methyluridine-3'-phosphate
  modified_base 20: mod_base = OTHER; note = 2'-O-methylguanosine-3'-phosphate
  modified_base 21: mod_base = OTHER; note = 2'-fluorouridine-3'-phosphate N-[tris(GalNAc-alkyl)-amidodecanoyl)]-4-hydroxyprolinol Hyp-(GalNAc-alkyl)3
ctagacctgttttgcttttgt

SEQ ID NO: 466 - RNA, 23 nt, synthetic construct
  source 1..23: mol_type = other RNA; note = Description of Artificial Sequence: Synthetic oligonucleotide
  modified_base 1: mod_base = OTHER; note = 2'-O-methyladenosine-3'-phosphate
  modified_base 2: mod_base = OTHER; note = 2'-O-methylcytidine-3'-phosphate
  modified_base 3: mod_base = OTHER; note = 2'-O-methyladenosine-3'-phosphate
  modified_base 4: mod_base = OTHER; note = 2'-fluoroadenosine-3'-phosphate
  modified_base 5: mod_base = OTHER; note = 2'-O-methyladenosine-3'-phosphate
  modified_base 6: mod_base = OTHER; note = 2'-fluoroadenosine-3'-phosphate
  modified_base 7: mod_base = OTHER; note = 2'-O-methylguanosine-3'-phosphate
  modified_base 8: mod_base = OTHER; note = 2'-O-methylcytidine-3'-phosphate
  modified_base 9: mod_base = OTHER; note = 2'-O-methyladenosine-3'-phosphate
  modified_base 10: mod_base = OTHER; note = 2'-fluoroadenosine-3'-phosphate
  modified_base 11: mod_base = OTHER; note = 2'-O-methyladenosine-3'-phosphate
  modified_base 12: mod_base = OTHER; note = 2'-O-methyladenosine-3'-phosphate
  modified_base 13: mod_base = OTHER; note = 2'-O-methylcytidine-3'-phosphate
  modified_base 14: mod_base = OTHER; note = 2'-fluoroadenosine-3'-phosphate
  modified_base 15: mod_base = OTHER; note = 2'-O-methylguanosine-3'-phosphate
  modified_base 16: mod_base = OTHER; note = 2'-fluoroguanosine-3'-phosphate
  modified_base 17: mod_base = OTHER; note = 2'-O-methyluridine-3'-phosphate
  modified_base 18: mod_base = OTHER; note = 2'-fluorocytidine-3'-phosphate
  modified_base 19: mod_base = OTHER; note = 2'-O-methyluridine-3'-phosphate
  modified_base 20: mod_base = OTHER; note = 2'-fluoroadenosine-3'-phosphate
  modified_base 21: mod_base = OTHER; note = 2'-O-methylguanosine-3'-phosphorothioate
  modified_base 22: mod_base = OTHER; note = 2'-fluoroadenosine-3'-phosphorothioate
  modified_base 23: mod_base = OTHER; note = beta-L-adenosine-3'-phosphate
acaaaagcaaaacaggtctagaa

SEQ ID NO: 467 - RNA, 21 nt, synthetic construct
  source 1..21: mol_type = other RNA; note = Description of Artificial Sequence: Synthetic oligonucleotide
  modified_base 1: mod_base = OTHER; note = beta-L-cytidine-3'-phosphate
  modified_base 2: mod_base = OTHER; note = 2'-O-methyluridine-3'-phosphate
  modified_base 3: mod_base = OTHER; note = 2'-fluoroadenosine-3'-phosphate
  modified_base 4: mod_base = OTHER; note = 2'-O-methylguanosine-3'-phosphate
  modified_base 5: mod_base = OTHER; note = 2'-fluoroadenosine-3'-phosphate
  modified_base 6: mod_base = OTHER; note = 2'-O-methylcytidine-3'-phosphate
  modified_base 7: mod_base = OTHER; note = 2'-fluorocytidine-3'-phosphate
  modified_base 8: mod_base = OTHER; note = 2'-O-methyluridine-3'-phosphate
  modified_base 9: mod_base = OTHER; note = 2'-fluoroguanosine-3'-phosphate
  modified_base 10: mod_base = OTHER; note = 2'-fluorouridine-3'-phosphate
  modified_base 11: mod_base = OTHER; note = 2'-fluorouridine-3'-phosphate
  modified_base 12: mod_base = OTHER; note = 2'-O-methyluridine-3'-phosphate
  modified_base 13: mod_base = OTHER; note = 2'-fluorouridine-3'-phosphate
  modified_base 14: mod_base = OTHER; note = 2'-O-methylguanosine-3'-phosphate
  modified_base 15: mod_base = OTHER; note = 2'-fluorocytidine-3'-phosphate
  modified_base 16: mod_base = OTHER; note = 2'-O-methyluridine-3'-phosphate
  modified_base 17: mod_base = OTHER; note = 2'-fluorouridine-3'-phosphate
  modified_base 18: mod_base = OTHER; note = 2'-O-methyluridine-3'-phosphate
  modified_base 19: mod_base = OTHER; note = 2'-O-methyluridine-3'-phosphate
  modified_base 20: mod_base = OTHER; note = 2'-O-methylguanosine-3'-phosphate
  modified_base 21: mod_base = OTHER; note = 2'-fluorouridine-3'-phosphate N-[tris(GalNAc-alkyl)-amidodecanoyl)]-4-hydroxyprolinol Hyp-(GalNAc-alkyl)3
ctagacctgttttgcttttgt

SEQ ID NO: 468 - RNA, 23 nt, synthetic construct
  source 1..23: mol_type = other RNA; note = Description of Artificial Sequence: Synthetic oligonucleotide
  modified_base 1: mod_base = OTHER; note = inverted adenosine-5'-phosphate
  modified_base 2: mod_base = OTHER; note = 2'-O-methylcytidine-3'-phosphate
  modified_base 3: mod_base = OTHER; note = 2'-O-methyladenosine-3'-phosphate
  modified_base 4: mod_base = OTHER; note = 2'-fluoroadenosine-3'-phosphate
  modified_base 5: mod_base = OTHER; note = 2'-O-methyladenosine-3'-phosphate
  modified_base 6: mod_base = OTHER; note = 2'-fluoroadenosine-3'-phosphate
  modified_base 7: mod_base = OTHER; note = 2'-O-methylguanosine-3'-phosphate
  modified_base 8: mod_base = OTHER; note = 2'-O-methylcytidine-3'-phosphate
  modified_base 9: mod_base = OTHER; note = 2'-O-methyladenosine-3'-phosphate
  modified_base 10: mod_base = OTHER; note = 2'-fluoroadenosine-3'-phosphate
  modified_base 11: mod_base = OTHER; note = 2'-O-methyladenosine-3'-phosphate
  modified_base 12: mod_base = OTHER; note = 2'-O-methyladenosine-3'-phosphate
  modified_base 13: mod_base = OTHER; note = 2'-O-methylcytidine-3'-phosphate
  modified_base 14: mod_base = OTHER; note = 2'-fluoroadenosine-3'-phosphate
  modified_base 15: mod_base = OTHER; note = 2'-O-methylguanosine-3'-phosphate
  modified_base 16: mod_base = OTHER; note = 2'-fluoroguanosine-3'-phosphate
  modified_base 17: mod_base = OTHER; note = 2'-O-methyluridine-3'-phosphate
  modified_base 18: mod_base = OTHER; note = 2'-fluorocytidine-3'-phosphate
  modified_base 19: mod_base = OTHER; note = 2'-O-methyluridine-3'-phosphate
  modified_base 20: mod_base = OTHER; note = 2'-fluoroadenosine-3'-phosphate
  modified_base 21: mod_base = OTHER; note = 2'-O-methylguanosine-3'-phosphorothioate
  modified_base 22: mod_base = OTHER; note = 2'-fluoroadenosine-3'-phosphorothioate
  modified_base 23: mod_base = OTHER; note = beta-L-adenosine-3'-phosphate
acaaaagcaaaacaggtctagaa

SEQ ID NO: 469 - RNA, 21 nt, synthetic construct
  source 1..21: mol_type = other RNA; note = Description of Artificial Sequence: Synthetic oligonucleotide
  modified_base 1: mod_base = OTHER; note = 2'-fluorocytidine-3'-phosphate
  modified_base 2: mod_base = OTHER; note = 2'-O-methyluridine-3'-phosphate
  modified_base 3: mod_base = OTHER; note = 2'-fluoroadenosine-3'-phosphate
  modified_base 4: mod_base = OTHER; note = 2'-O-methylguanosine-3'-phosphate
  modified_base 5: mod_base = OTHER; note = 2'-fluoroadenosine-3'-phosphate
  modified_base 6: mod_base = OTHER; note = 2'-O-methylcytidine-3'-phosphate
  modified_base 7: mod_base = OTHER; note = 2'-fluorocytidine-3'-phosphate
  modified_base 8: mod_base = OTHER; note = 2'-O-methyluridine-3'-phosphate
  modified_base 9: mod_base = OTHER; note = 2'-fluoroguanosine-3'-phosphate
  modified_base 10: mod_base = OTHER; note = 2'-fluorouridine-3'-phosphate
  modified_base 11: mod_base = OTHER; note = 2'-fluorouridine-3'-phosphate
  modified_base 12: mod_base = OTHER; note = 2'-O-methyluridine-3'-phosphate
  modified_base 13: mod_base = OTHER; note = 2'-fluorouridine-3'-phosphate
  modified_base 14: mod_base = OTHER; note = 2'-O-methylguanosine-3'-phosphate
  modified_base 15: mod_base = OTHER; note = 2'-fluorocytidine-3'-phosphate
  modified_base 16: mod_base = OTHER; note = 2'-O-methyluridine-3'-phosphate
  modified_base 17: mod_base = OTHER; note = 2'-fluorouridine-3'-phosphate
  modified_base 18: mod_base = OTHER; note = 2'-O-methyluridine-3'-phosphate
  modified_base 19: mod_base = OTHER; note = 2'-fluorouridine-3'-phosphate
  modified_base 20: mod_base = OTHER; note = 2'-O-methylguanosine-3'-phosphate
  modified_base 21: mod_base = OTHER; note = 2'-fluorouridine-3'-phosphate N-[tris(GalNAc-alkyl)-amidodecanoyl)]-4-hydroxyprolinol Hyp-(GalNAc-alkyl)3
ctagacctgttttgcttttgt

SEQ ID NO: 470 - RNA, 23 nt, synthetic construct
  source 1..23: mol_type = other RNA; note = Description of Artificial Sequence: Synthetic oligonucleotide
  modified_base 1: mod_base = OTHER; note = 2'-O-methyladenosine-3'-phosphate
  modified_base 2: mod_base = OTHER; note = 2'-fluorocytidine-3'-phosphate
  modified_base 3: mod_base = OTHER; note = 2'-O-methyladenosine-3'-phosphate
  modified_base 4: mod_base = OTHER; note = 2'-O-methyladenosine-3'-phosphate
  modified_base 5: mod_base = OTHER; note = 2'-O-methyladenosine-3'-phosphate
  modified_base 6: mod_base = OTHER; note = 2'-fluoroadenosine-3'-phosphate
  modified_base 7: mod_base = OTHER; note = 2'-O-methylguanosine-3'-phosphate
  modified_base 8: mod_base = OTHER; note = 2'-fluorocytidine-3'-phosphate
  modified_base 9: mod_base = OTHER; note = 2'-O-methyladenosine-3'-phosphate
  modified_base 10: mod_base = OTHER; note = 2'-fluoroadenosine-3'-phosphate
  modified_base 11: mod_base = OTHER; note = 2'-O-methyladenosine-3'-phosphate
  modified_base 12: mod_base = OTHER; note = 2'-O-methyladenosine-3'-phosphate
  modified_base 13: mod_base = OTHER; note = 2'-O-methylcytidine-3'-phosphate
  modified_base 14: mod_base = OTHER; note = 2'-fluoroadenosine-3'-phosphate
  modified_base 15: mod_base = OTHER; note = 2'-O-methylguanosine-3'-phosphate
  modified_base 16: mod_base = OTHER; note = 2'-fluoroguanosine-3'-phosphate
  modified_base 17: mod_base = OTHER; note = 2'-O-methyluridine-3'-phosphate
  modified_base 18: mod_base = OTHER; note = 2'-fluorocytidine-3'-phosphate
  modified_base 19: mod_base = OTHER; note = 2'-O-methyluridine-3'-phosphate
  modified_base 20: mod_base = OTHER; note = 2'-fluoroadenosine-3'-phosphate
  modified_base 21: mod_base = OTHER; note = 2'-O-methylguanosine-3'-phosphorothioate
  modified_base 22: mod_base = OTHER; note = 2'-O-methyladenosine-3'-phosphorothioate
  modified_base 23: mod_base = OTHER; note = 2'-O-methyladenosine-3'-phosphate
acaaaagcaaaacaggtctagaa

SEQ ID NO: 471 - RNA, 21 nt, synthetic construct
  source 1..21: mol_type = other RNA; note = Description of Artificial Sequence: Synthetic oligonucleotide
  modified_base 1: mod_base = OTHER; note = 2'-fluorocytidine-3'-phosphate
  modified_base 2: mod_base = OTHER; note = 2'-O-methyluridine-3'-phosphate
  modified_base 3: mod_base = OTHER; note = 2'-O-methyladenosine-3'-phosphate
  modified_base 4: mod_base = OTHER; note = 2'-O-methylguanosine-3'-phosphate
  modified_base 5: mod_base = OTHER; note = 2'-fluoroadenosine-3'-phosphate
  modified_base 6: mod_base = OTHER; note = 2'-O-methylcytidine-3'-phosphate
  modified_base 7: mod_base = OTHER; note = 2'-fluorocytidine-3'-phosphate
  modified_base 8: mod_base = OTHER; note = 2'-O-methyluridine-3'-phosphate
  modified_base 9: mod_base = OTHER; note = 2'-fluoroguanosine-3'-phosphate
  modified_base 10: mod_base = OTHER; note = 2'-fluorouridine-3'-phosphate
  modified_base 11: mod_base = OTHER; note = 2'-fluorouridine-3'-phosphate
  modified_base 12: mod_base = OTHER; note = 2'-O-methyluridine-3'-phosphate
  modified_base 13: mod_base = OTHER; note = 2'-fluorouridine-3'-phosphate
  modified_base 14: mod_base = OTHER; note = 2'-O-methylguanosine-3'-phosphate
  modified_base 15: mod_base = OTHER; note = 2'-fluorocytidine-3'-phosphate
  modified_base 16: mod_base = OTHER; note = 2'-O-methyluridine-3'-phosphate
  modified_base 17: mod_base = OTHER; note = 2'-fluorouridine-3'-phosphate
  modified_base 18: mod_base = OTHER; note = 2'-O-methyluridine-3'-phosphate
  modified_base 19: mod_base = OTHER; note = 2'-fluorouridine-3'-phosphate
  modified_base 20: mod_base = OTHER; note = 2'-O-methylguanosine-3'-phosphate
  modified_base 21: mod_base = OTHER; note = 2'-fluorouridine-3'-phosphate N-[tris(GalNAc-alkyl)-amidodecanoyl)]-4-hydroxyprolinol Hyp-(GalNAc-alkyl)3
ctagacctgttttgcttttgt

SEQ ID NO: 472 - RNA, 23 nt, synthetic construct
  source 1..23: mol_type = other RNA; note = Description of Artificial Sequence: Synthetic oligonucleotide
  modified_base 1: mod_base = OTHER; note = 2'-O-methyladenosine-3'-phosphate
  modified_base 2: mod_base = OTHER; note = 2'-fluorocytidine-3'-phosphate
  modified_base 3: mod_base = OTHER; note = 2'-O-methyladenosine-3'-phosphate
  modified_base 4: mod_base = OTHER; note = 2'-O-methyladenosine-3'-phosphate
  modified_base 5: mod_base = OTHER; note = 2'-O-methyladenosine-3'-phosphate
  modified_base 6: mod_base = OTHER; note = 2'-fluoroadenosine-3'-phosphate
  modified_base 7: mod_base = OTHER; note = 2'-O-methylguanosine-3'-phosphate
  modified_base 8: mod_base = OTHER; note = 2'-fluorocytidine-3'-phosphate
  modified_base 9: mod_base = OTHER; note = 2'-O-methyladenosine-3'-phosphate
  modified_base 10: mod_base = OTHER; note = 2'-fluoroadenosine-3'-phosphate
  modified_base 11: mod_base = OTHER; note = 2'-O-methyladenosine-3'-phosphate
  modified_base 12: mod_base = OTHER; note = 2'-O-methyladenosine-3'-phosphate
  modified_base 13: mod_base = OTHER; note = 2'-O-methylcytidine-3'-phosphate
  modified_base 14: mod_base = OTHER; note = 2'-fluoroadenosine-3'-phosphate
  modified_base 15: mod_base = OTHER; note = 2'-O-methylguanosine-3'-phosphate
  modified_base 16: mod_base = OTHER; note = 2'-fluoroguanosine-3'-phosphate
  modified_base 17: mod_base = OTHER; note = 2'-O-methyluridine-3'-phosphate
  modified_base 18: mod_base = OTHER; note = 2'-fluorocytidine-3'-phosphate
  modified_base 19: mod_base = OTHER; note = 2'-O-methyluridine-3'-phosphate
  modified_base 20: mod_base = OTHER; note = 2'-fluoroadenosine-3'-phosphate
  modified_base 21: mod_base = OTHER; note = 2'-O-methylguanosine-3'-phosphorothioate
  modified_base 22: mod_base = OTHER; note = 2'-O-methyladenosine-3'-phosphorothioate
  modified_base 23: mod_base = OTHER; note = 2'-O-methyladenosine-3'-phosphate
acaaaagcaaaacaggtctagaa

SEQ ID NO: 473 - RNA, 21 nt, synthetic construct
  source 1..21: mol_type = other RNA; note = Description of Artificial Sequence: Synthetic oligonucleotide
  modified_base 1: mod_base = OTHER; note = 2'-fluorocytidine-3'-phosphate
  modified_base 2: mod_base = OTHER; note = 2'-O-methyluridine-3'-phosphate
  modified_base 3: mod_base = OTHER; note = 2'-O-methyladenosine-3'-phosphate
  modified_base 4: mod_base = OTHER; note = 2'-O-methylguanosine-3'-phosphate
  modified_base 5: mod_base = OTHER; note = 2'-fluoroadenosine-3'-phosphate
  modified_base 6: mod_base = OTHER; note = 2'-O-methylcytidine-3'-phosphate
  modified_base 7: mod_base = OTHER; note = 2'-fluorocytidine-3'-phosphate
  modified_base 8: mod_base = OTHER; note = 2'-O-methyluridine-3'-phosphate
  modified_base 9: mod_base = OTHER; note = 2'-fluoroguanosine-3'-phosphate
  modified_base 10: mod_base = OTHER; note = 2'-fluorouridine-3'-phosphate
  modified_base 11: mod_base = OTHER; note = 2'-fluorouridine-3'-phosphate
  modified_base 12: mod_base = OTHER; note = 2'-O-methyluridine-3'-phosphate
  modified_base 13: mod_base = OTHER; note = 2'-fluorouridine-3'-phosphate
  modified_base 14: mod_base = OTHER; note = 2'-O-methylguanosine-3'-phosphate
  modified_base 15: mod_base = OTHER; note = 2'-O-methylcytidine-3'-phosphate
  modified_base 16: mod_base = OTHER; note = 2'-O-methyluridine-3'-phosphate
  modified_base 17: mod_base = OTHER; note = 2'-fluorouridine-3'-phosphate
  modified_base 18: mod_base = OTHER; note = 2'-O-methyluridine-3'-phosphate
  modified_base 19: mod_base = OTHER; note = 2'-fluorouridine-3'-phosphate
  modified_base 20: mod_base = OTHER; note = 2'-O-methylguanosine-3'-phosphate
  modified_base 21: mod_base = OTHER; note = 2'-O-methyluridine-3'-phosphate N-[tris(GalNAc-alkyl)-amidodecanoyl)]-4-hydroxyprolinol Hyp-(GalNAc-alkyl)3
ctagacctgttttgcttttgt

SEQ ID NO: 474 - RNA, 23 nt, synthetic construct
  source 1..23: mol_type = other RNA; note = Description of Artificial Sequence: Synthetic oligonucleotide
  modified_base 1: mod_base = OTHER; note = 2'-O-methyladenosine-3'-phosphate
  modified_base 2: mod_base = OTHER; note = 2'-fluorocytidine-3'-phosphate
  modified_base 3: mod_base = OTHER; note = 2'-O-methyladenosine-3'-phosphate
  modified_base 4: mod_base = OTHER; note = 2'-O-methyladenosine-3'-phosphate
  modified_base 5: mod_base = OTHER; note = 2'-O-methyladenosine-3'-phosphate
  modified_base 6: mod_base = OTHER; note = 2'-fluoroadenosine-3'-phosphate
  modified_base 7: mod_base = OTHER; note = 2'-O-methylguanosine-3'-phosphate
  modified_base 8: mod_base = OTHER; note = 2'-fluorocytidine-3'-phosphate
  modified_base 9: mod_base = OTHER; note = 2'-O-methyladenosine-3'-phosphate
  modified_base 10: mod_base = OTHER; note = 2'-fluoroadenosine-3'-phosphate
  modified_base 11: mod_base = OTHER; note = 2'-O-methyladenosine-3'-phosphate
  modified_base 12: mod_base = OTHER; note = 2'-O-methyladenosine-3'-phosphate
  modified_base 13: mod_base = OTHER; note = 2'-O-methylcytidine-3'-phosphate
  modified_base 14: mod_base = OTHER; note = 2'-fluoroadenosine-3'-phosphate
  modified_base 15: mod_base = OTHER; note = 2'-O-methylguanosine-3'-phosphate
  modified_base 16: mod_base = OTHER; note = 2'-fluoroguanosine-3'-phosphate
  modified_base 17: mod_base = OTHER; note = 2'-O-methyluridine-3'-phosphate
  modified_base 18: mod_base = OTHER; note = 2'-fluorocytidine-3'-phosphate
  modified_base 19: mod_base = OTHER; note = 2'-O-methyluridine-3'-phosphate
  modified_base 20: mod_base = OTHER; note = 2'-fluoroadenosine-3'-phosphate
  modified_base 21: mod_base = OTHER; note = 2'-O-methylguanosine-3'-phosphorothioate
  modified_base 22: mod_base = OTHER; note = 2'-O-methyladenosine-3'-phosphorothioate
  modified_base 23: mod_base = OTHER; note = 2'-O-methyladenosine-3'-phosphate
acaaaagcaaaacaggtctagaa

SEQ ID NO: 475 - RNA, 21 nt, synthetic construct
  source 1..21: mol_type = other RNA; note = Description of Artificial Sequence: Synthetic oligonucleotide
  modified_base 1: mod_base = OTHER; note = 2'-fluorocytidine-3'-phosphate
  modified_base 2: mod_base = OTHER; note = 2'-O-methyluridine-3'-phosphate
  modified_base 3: mod_base = OTHER; note = 2'-O-methyladenosine-3'-phosphate
  modified_base 4: mod_base = OTHER; note = 2'-O-methylguanosine-3'-phosphate
  modified_base 5: mod_base = OTHER; note = 2'-fluoroadenosine-3'-phosphate
  modified_base 6: mod_base = OTHER; note = 2'-O-methylcytidine-3'-phosphate
  modified_base 7: mod_base = OTHER; note = 2'-O-methylcytidine-3'-phosphate
  modified_base 8: mod_base = OTHER; note = 2'-O-methyluridine-3'-phosphate
  modified_base 9: mod_base = OTHER; note = 2'-fluoroguanosine-3'-phosphate
  modified_base 10: mod_base = OTHER; note = 2'-fluorouridine-3'-phosphate
  modified_base 11: mod_base = OTHER; note = 2'-fluorouridine-3'-phosphate
  modified_base 12: mod_base = OTHER; note = 2'-O-methyluridine-3'-phosphate
  modified_base 13: mod_base = OTHER; note = 2'-fluorouridine-3'-phosphate
  modified_base 14: mod_base = OTHER; note = 2'-O-methylguanosine-3'-phosphate
  modified_base 15: mod_base = OTHER; note = 2'-O-methylcytidine-3'-phosphate
  modified_base 16: mod_base = OTHER; note = 2'-O-methyluridine-3'-phosphate
  modified_base 17: mod_base = OTHER; note = 2'-fluorouridine-3'-phosphate
  modified_base 18: mod_base = OTHER; note = 2'-O-methyluridine-3'-phosphate
  modified_base 19: mod_base = OTHER; note = 2'-fluorouridine-3'-phosphate
  modified_base 20: mod_base = OTHER; note = 2'-O-methylguanosine-3'-phosphate
  modified_base 21: mod_base = OTHER; note = 2'-O-methyluridine-3'-phosphate N-[tris(GalNAc-alkyl)-amidodecanoyl)]-4-hydroxyprolinol Hyp-(GalNAc-alkyl)3
ctagacctgttttgcttttgt

SEQ ID NO: 476 - RNA, 23 nt, synthetic construct
  source 1..23: mol_type = other RNA; note = Description of Artificial Sequence: Synthetic oligonucleotide
  modified_base 1: mod_base = OTHER; note = 2'-O-methyladenosine-3'-phosphate
  modified_base 2: mod_base = OTHER; note = 2'-fluorocytidine-3'-phosphate
  modified_base 3: mod_base = OTHER; note = 2'-O-methyladenosine-3'-phosphate
  modified_base 4: mod_base = OTHER; note = 2'-O-methyladenosine-3'-phosphate
  modified_base 5: mod_base = OTHER; note = 2'-O-methyladenosine-3'-phosphate
  modified_base 6: mod_base = OTHER; note = 2'-fluoroadenosine-3'-phosphate
  modified_base 7: mod_base = OTHER; note = 2'-O-methylguanosine-3'-phosphate
  modified_base 8: mod_base = OTHER; note = 2'-fluorocytidine-3'-phosphate
  modified_base 9: mod_base = OTHER; note = 2'-O-methyladenosine-3'-phosphate
  modified_base 10: mod_base = OTHER; note = 2'-fluoroadenosine-3'-phosphate
  modified_base 11: mod_base = OTHER; note = 2'-O-methyladenosine-3'-phosphate
  modified_base 12: mod_base = OTHER; note = 2'-O-methyladenosine-3'-phosphate
  modified_base 13: mod_base = OTHER; note = 2'-O-methylcytidine-3'-phosphate
  modified_base 14: mod_base = OTHER; note = 2'-fluoroadenosine-3'-phosphate
  modified_base 15: mod_base = OTHER; note = 2'-O-methylguanosine-3'-phosphate
  modified_base 16: mod_base = OTHER; note = 2'-fluoroguanosine-3'-phosphate
  modified_base 17: mod_base = OTHER; note = 2'-O-methyluridine-3'-phosphate
  modified_base 18: mod_base = OTHER; note = 2'-fluorocytidine-3'-phosphate
  modified_base 19: mod_base = OTHER; note = 2'-O-methyluridine-3'-phosphate
  modified_base 20: mod_base = OTHER; note = 2'-fluoroadenosine-3'-phosphate
  modified_base 21: mod_base = OTHER; note = 2'-O-methylguanosine-3'-phosphorothioate
  modified_base 22: mod_base = OTHER; note = 2'-O-methyladenosine-3'-phosphorothioate
  modified_base 23: mod_base = OTHER; note = 2'-O-methyladenosine-3'-phosphate
acaaaagcaaaacaggtctagaa

SEQ ID NO: 477 - RNA, 21 nt, synthetic construct
  source 1..21: mol_type = other RNA; note = Description of Artificial Sequence: Synthetic oligonucleotide
  modified_base 1: mod_base = OTHER; note = 2'-fluorocytidine-3'-phosphate
  modified_base 2: mod_base = OTHER; note = 2'-O-methyluridine-3'-phosphate
  modified_base 3: mod_base = OTHER; note = 2'-O-methyladenosine-3'-phosphate
  modified_base 4: mod_base = OTHER; note = 2'-O-methylguanosine-3'-phosphate
  modified_base 5: mod_base = OTHER; note = 2'-fluoroadenosine-3'-phosphate
  modified_base 6: mod_base = OTHER; note = 2'-O-methylcytidine-3'-phosphate
  modified_base 7: mod_base = OTHER; note = 2'-O-methylcytidine-3'-phosphate
  modified_base 8: mod_base = OTHER; note = 2'-O-methyluridine-3'-phosphate
  modified_base 9: mod_base = OTHER; note = 2'-fluoroguanosine-3'-phosphate
  modified_base 10: mod_base = OTHER; note = 2'-fluorouridine-3'-phosphate
  modified_base 11: mod_base = OTHER; note = 2'-fluorouridine-3'-phosphate
  modified_base 12: mod_base = OTHER; note = 2'-O-methyluridine-3'-phosphate
  modified_base 13: mod_base = OTHER; note = 2'-O-methyluridine-3'-phosphate
  modified_base 14: mod_base = OTHER; note = 2'-O-methylguanosine-3'-phosphate
  modified_base 15: mod_base = OTHER; note = 2'-O-methylcytidine-3'-phosphate
  modified_base 16: mod_base = OTHER; note = 2'-O-methyluridine-3'-phosphate
  modified_base 17: mod_base = OTHER; note = 2'-fluorouridine-3'-phosphate
  modified_base 18: mod_base = OTHER; note = 2'-O-methyluridine-3'-phosphate
  modified_base 19: mod_base = OTHER; note = 2'-O-methyluridine-3'-phosphate
  modified_base 20: mod_base = OTHER; note = 2'-O-methylguanosine-3'-phosphate
  modified_base 21: mod_base = OTHER; note = 2'-O-methyluridine-3'-phosphate N-[tris(GalNAc-alkyl)-amidodecanoyl)]-4-hydroxyprolinol Hyp-(GalNAc-alkyl)3
ctagacctgttttgcttttgt

SEQ ID NO: 478 - RNA, 23 nt, synthetic construct
  source 1..23: mol_type = other RNA; note = Description of Artificial Sequence: Synthetic oligonucleotide
  modified_base 1: mod_base = OTHER; note = 2'-O-methyladenosine-3'-phosphate
  modified_base 2: mod_base = OTHER; note = 2'-fluorocytidine-3'-phosphate
  modified_base 3: mod_base = OTHER; note = 2'-O-methyladenosine-3'-phosphate
  modified_base 4: mod_base = OTHER; note = 2'-O-methyladenosine-3'-phosphate
  modified_base 5: mod_base = OTHER; note = 2'-O-methyladenosine-3'-phosphate
  modified_base 6: mod_base = OTHER; note = 2'-fluoroadenosine-3'-phosphate
  modified_base 7: mod_base = OTHER; note = 2'-O-methylguanosine-3'-phosphate
  modified_base 8: mod_base = OTHER; note = 2'-fluorocytidine-3'-phosphate
  modified_base 9: mod_base = OTHER; note = 2'-O-methyladenosine-3'-phosphate
  modified_base 10: mod_base = OTHER; note = 2'-fluoroadenosine-3'-phosphate
  modified_base 11: mod_base = OTHER; note = 2'-O-methyladenosine-3'-phosphate
  modified_base 12: mod_base = OTHER; note = 2'-O-methyladenosine-3'-phosphate
  modified_base 13: mod_base = OTHER; note = 2'-O-methylcytidine-3'-phosphate
  modified_base 14: mod_base = OTHER; note = 2'-fluoroadenosine-3'-phosphate
  modified_base 15: mod_base = OTHER; note = 2'-O-methylguanosine-3'-phosphate
  modified_base 16: mod_base = OTHER; note = 2'-fluoroguanosine-3'-phosphate
  modified_base 17: mod_base = OTHER; note = 2'-O-methyluridine-3'-phosphate
  modified_base 18: mod_base = OTHER; note = 2'-fluorocytidine-3'-phosphate
  modified_base 19: mod_base = OTHER; note = 2'-O-methyluridine-3'-phosphate
  modified_base 20: mod_base = OTHER; note = 2'-fluoroadenosine-3'-phosphate
  modified_base 21: mod_base = OTHER; note = 2'-O-methylguanosine-3'-phosphorothioate
  modified_base 22: mod_base = OTHER; note = 2'-O-methyladenosine-3'-phosphorothioate
  modified_base 23: mod_base = OTHER; note = 2'-O-methyladenosine-3'-phosphate
acaaaagcaaaacaggtctagaa

SEQ ID NO: 479 - RNA, 21 nt, synthetic construct
  source 1..21: mol_type = other RNA; note = Description of Artificial Sequence: Synthetic oligonucleotide
  modified_base 1: mod_base = OTHER; note = 2'-fluorocytidine-3'-phosphate
  modified_base 2: mod_base = OTHER; note = 2'-O-methyluridine-3'-phosphate
  modified_base 3: mod_base = OTHER; note = 2'-O-methyladenosine-3'-phosphate
  modified_base 4: mod_base = OTHER; note = 2'-O-methylguanosine-3'-phosphate
  modified_base 5: mod_base = OTHER; note = 2'-O-methyladenosine-3'-phosphate
  modified_base 6: mod_base = OTHER; note = 2'-O-methylcytidine-3'-phosphate
  modified_base 7: mod_base = OTHER; note = 2'-O-methylcytidine-3'-phosphate
  modified_base 8: mod_base = OTHER; note = 2'-O-methyluridine-3'-phosphate
  modified_base 9: mod_base = OTHER; note = 2'-fluoroguanosine-3'-phosphate
  modified_base 10: mod_base = OTHER; note = 2'-fluorouridine-3'-phosphate
  modified_base 11: mod_base = OTHER; note = 2'-fluorouridine-3'-phosphate
  modified_base 12: mod_base = OTHER; note = 2'-O-methyluridine-3'-phosphate
  modified_base 13: mod_base = OTHER; note = 2'-O-methyluridine-3'-phosphate
  modified_base 14: mod_base = OTHER; note = 2'-O-methylguanosine-3'-phosphate
  modified_base 15: mod_base = OTHER; note = 2'-O-methylcytidine-3'-phosphate
  modified_base 16: mod_base = OTHER; note = 2'-O-methyluridine-3'-phosphate
  modified_base 17: mod_base = OTHER; note = 2'-O-methyluridine-3'-phosphate
  modified_base 18: mod_base = OTHER; note = 2'-O-methyluridine-3'-phosphate
  modified_base 19: mod_base = OTHER; note = 2'-O-methyluridine-3'-phosphate
  modified_base 20: mod_base = OTHER; note = 2'-O-methylguanosine-3'-phosphate
  modified_base 21: mod_base = OTHER; note = 2'-O-methyluridine-3'-phosphate N-[tris(GalNAc-alkyl)-amidodecanoyl)]-4-hydroxyprolinol Hyp-(GalNAc-alkyl)3
ctagacctgttttgcttttgt

SEQ ID NO: 480 - RNA, 23 nt, synthetic construct
  source 1..23: mol_type = other RNA; note = Description of Artificial Sequence: Synthetic oligonucleotide
  modified_base 1: mod_base = OTHER; note = 2'-O-methyladenosine-3'-phosphate
  modified_base 2: mod_base = OTHER; note = 2'-fluorocytidine-3'-phosphate
  modified_base 3: mod_base = OTHER; note = 2'-O-methyladenosine-3'-phosphate
  modified_base 4: mod_base = OTHER; note = 2'-O-methyladenosine-3'-phosphate
  modified_base 5: mod_base = OTHER; note = 2'-O-methyladenosine-3'-phosphate
  modified_base 6: mod_base = OTHER; note = 2'-fluoroadenosine-3'-phosphate
  modified_base 7: mod_base = OTHER; note = 2'-O-methylguanosine-3'-phosphate
  modified_base 8: mod_base = OTHER; note = 2'-fluorocytidine-3'-phosphate
  modified_base 9: mod_base = OTHER; note = 2'-O-methyladenosine-3'-phosphate
  modified_base 10: mod_base = OTHER; note = 2'-fluoroadenosine-3'-phosphate
  modified_base 11: mod_base = OTHER; note = 2'-O-methyladenosine-3'-phosphate
  modified_base 12: mod_base = OTHER; note = 2'-O-methyladenosine-3'-phosphate
  modified_base 13: mod_base = OTHER; note = 2'-O-methylcytidine-3'-phosphate
  modified_base 14: mod_base = OTHER; note = 2'-fluoroadenosine-3'-phosphate
  modified_base 15: mod_base = OTHER; note = 2'-O-methylguanosine-3'-phosphate
  modified_base 16: mod_base = OTHER; note = 2'-fluoroguanosine-3'-phosphate
  modified_base 17: mod_base = OTHER; note = 2'-O-methyluridine-3'-phosphate
  modified_base 18: mod_base = OTHER; note = 2'-fluorocytidine-3'-phosphate
  modified_base 19: mod_base = OTHER; note = 2'-O-methyluridine-3'-phosphate
  modified_base 20: mod_base = OTHER; note = 2'-fluoroadenosine-3'-phosphate
  modified_base 21: mod_base = OTHER; note = 2'-O-methylguanosine-3'-phosphorothioate
  modified_base 22: mod_base = OTHER; note = 2'-O-methyladenosine-3'-phosphorothioate
  modified_base 23: mod_base = OTHER; note = 2'-O-methyladenosine-3'-phosphate
acaaaagcaaaacaggtctagaa

SEQ ID NO: 481 - RNA, 21 nt, synthetic construct
  source 1..21: mol_type = other RNA; note = Description of Artificial Sequence: Synthetic oligonucleotide
  modified_base 1: mod_base = OTHER; note = 2'-fluorocytidine-3'-phosphate
  modified_base 2: mod_base = OTHER; note = 2'-O-methyluridine-3'-phosphate
  modified_base 3: mod_base = OTHER; note = 2'-fluoroadenosine-3'-phosphate
  modified_base 4: mod_base = OTHER; note = 2'-O-methylguanosine-3'-phosphate
  modified_base 5: mod_base = OTHER; note = 2'-fluoroadenosine-3'-phosphate
  modified_base 6: mod_base = OTHER; note = 2'-O-methylcytidine-3'-phosphate
  modified_base 7: mod_base = OTHER; note = 2'-fluorocytidine-3'-phosphate
  modified_base 8: mod_base = OTHER; note = 2'-O-methyluridine-3'-phosphate
  modified_base 9: mod_base = OTHER; note = 2'-fluoroguanosine-3'-phosphate
  modified_base 10: mod_base = OTHER; note = 2'-fluorouridine-3'-phosphate
  modified_base 11: mod_base = OTHER; note = 2'-fluorouridine-3'-phosphate
  modified_base 12: mod_base = OTHER; note = 2'-O-methyluridine-3'-phosphate
  modified_base 13: mod_base = OTHER; note = 2'-fluorouridine-3'-phosphate
  modified_base 14: mod_base = OTHER; note = 2'-O-methylguanosine-3'-phosphate
  modified_base 15: mod_base = OTHER; note = 2'-fluorocytidine-3'-phosphate
  modified_base 16: mod_base = OTHER; note = 2'-O-methyluridine-3'-phosphate
  modified_base 17: mod_base = OTHER; note = 2'-fluorouridine-3'-phosphate
  modified_base 18: mod_base = OTHER; note = 2'-O-methyluridine-3'-phosphate
  modified_base 19: mod_base = OTHER; note = 2'-fluorouridine-3'-phosphate
  modified_base 20: mod_base = OTHER; note = 2'-O-methylguanosine-3'-phosphate
  modified_base 21: mod_base = OTHER; note = 2'-fluorouridine-3'-phosphate N-[tris(GalNAc-alkyl)-amidodecanoyl)]-4-hydroxyprolinol Hyp-(GalNAc-alkyl)3
ctagacctgttttgcttttgt

SEQ ID NO: 482 - RNA, 23 nt, synthetic construct
  source 1..23: mol_type = other RNA; note = Description of Artificial Sequence: Synthetic oligonucleotide
  modified_base 1: mod_base = OTHER; note = 2'-O-methyladenosine-3'-phosphate
  modified_base 2: mod_base = OTHER; note = 2'-fluorocytidine-3'-phosphate
  modified_base 3: mod_base = OTHER; note = 2'-O-methyladenosine-3'-phosphate
  modified_base 4: mod_base = OTHER; note = 2'-O-methyladenosine-3'-phosphate
  modified_base 5: mod_base = OTHER; note = 2'-O-methyladenosine-3'-phosphate
  modified_base 6: mod_base = OTHER; note = 2'-fluoroadenosine-3'-phosphate
  modified_base 7: mod_base = OTHER; note = 2'-O-methylguanosine-3'-phosphate
  modified_base 8: mod_base = OTHER; note = 2'-fluorocytidine-3'-phosphate
  modified_base 9: mod_base = OTHER; note = 2'-O-methyladenosine-3'-phosphate
  modified_base 10: mod_base = OTHER; note = 2'-fluoroadenosine-3'-phosphate
  modified_base 11: mod_base = OTHER; note = 2'-O-methyladenosine-3'-phosphate
  modified_base 12: mod_base = OTHER; note = 2'-O-methyladenosine-3'-phosphate
  modified_base 13: mod_base = OTHER; note = 2'-O-methylcytidine-3'-phosphate
  modified_base 14: mod_base = OTHER; note = 2'-fluoroadenosine-3'-phosphate
  modified_base 15: mod_base = OTHER; note = 2'-O-methylguanosine-3'-phosphate
  modified_base 16: mod_base = OTHER; note = 2'-O-methylguanosine-3'-phosphate
  modified_base 17: mod_base = OTHER; note = 2'-O-methyluridine-3'-phosphate
  modified_base 18: mod_base = OTHER; note = 2'-fluorocytidine-3'-phosphate
  modified_base 19: mod_base = OTHER; note = 2'-O-methyluridine-3'-phosphate
  modified_base 20: mod_base = OTHER; note = 2'-fluoroadenosine-3'-phosphate
  modified_base 21: mod_base = OTHER; note = 2'-O-methylguanosine-3'-phosphorothioate
  modified_base 22: mod_base = OTHER; note = 2'-O-methyladenosine-3'-phosphorothioate
  modified_base 23: mod_base = OTHER; note = 2'-O-methyladenosine-3'-phosphate
acaaaagcaaaacaggtctagaa

SEQ ID NO: 483 - RNA, 21 nt, synthetic construct
  source 1..21: mol_type = other RNA; note = Description of Artificial Sequence: Synthetic oligonucleotide
  modified_base 1: mod_base = OTHER; note = 2'-fluorocytidine-3'-phosphate
  modified_base 2: mod_base = OTHER; note = 2'-O-methyluridine-3'-phosphate
  modified_base 3: mod_base = OTHER; note = 2'-O-methyladenosine-3'-phosphate
  modified_base 4: mod_base = OTHER; note = 2'-O-methylguanosine-3'-phosphate
  modified_base 5: mod_base = OTHER; note = 2'-fluoroadenosine-3'-phosphate
  modified_base 6: mod_base = OTHER; note = 2'-O-methylcytidine-3'-phosphate
  modified_base 7: mod_base = OTHER; note = 2'-fluorocytidine-3'-phosphate
  modified_base 8: mod_base = OTHER; note = 2'-O-methyluridine-3'-phosphate
  modified_base 9: mod_base = OTHER; note = 2'-fluoroguanosine-3'-phosphate
  modified_base 10: mod_base = OTHER; note = 2'-fluorouridine-3'-phosphate
  modified_base 11: mod_base = OTHER; note = 2'-fluorouridine-3'-phosphate
  modified_base 12: mod_base = OTHER; note = 2'-O-methyluridine-3'-phosphate
  modified_base 13: mod_base = OTHER; note = 2'-fluorouridine-3'-phosphate
  modified_base 14: mod_base = OTHER; note = 2'-O-methylguanosine-3'-phosphate
  modified_base 15: mod_base = OTHER; note = 2'-fluorocytidine-3'-phosphate
  modified_base 16: mod_base = OTHER; note = 2'-O-methyluridine-3'-phosphate
  modified_base 17: mod_base = OTHER; note = 2'-fluorouridine-3'-phosphate
  modified_base 18: mod_base = OTHER; note = 2'-O-methyluridine-3'-phosphate
  modified_base 19: mod_base = OTHER; note = 2'-fluorouridine-3'-phosphate
  modified_base 20: mod_base = OTHER; note = 2'-O-methylguanosine-3'-phosphate
  modified_base 21: mod_base = OTHER; note = 2'-fluorouridine-3'-phosphate N-[tris(GalNAc-alkyl)-amidodecanoyl)]-4-hydroxyprolinol Hyp-(GalNAc-alkyl)3
ctagacctgttttgcttttgt

SEQ ID NO: 484 - RNA, 23 nt, synthetic construct
  source 1..23: mol_type = other RNA; note = Description of Artificial Sequence: Synthetic oligonucleotide
  modified_base 1: mod_base = OTHER; note = 2'-O-methyladenosine-3'-phosphate
  modified_base 2: mod_base = OTHER; note = 2'-fluorocytidine-3'-phosphate
  modified_base 3: mod_base = OTHER; note = 2'-O-methyladenosine-3'-phosphate
  modified_base 4: mod_base = OTHER; note = 2'-O-methyladenosine-3'-phosphate
  modified_base 5: mod_base = OTHER; note = 2'-O-methyladenosine-3'-phosphate
  modified_base 6: mod_base = OTHER; note = 2'-fluoroadenosine-3'-phosphate
  modified_base 7: mod_base = OTHER; note = 2'-O-methylguanosine-3'-phosphate
  modified_base 8: mod_base = OTHER; note = 2'-fluorocytidine-3'-phosphate
  modified_base 9: mod_base = OTHER; note = 2'-O-methyladenosine-3'-phosphate
  modified_base 10: mod_base = OTHER; note = 2'-fluoroadenosine-3'-phosphate
  modified_base 11: mod_base = OTHER; note = 2'-O-methyladenosine-3'-phosphate
  modified_base 12: mod_base = OTHER; note = 2'-O-methyladenosine-3'-phosphate
  modified_base 13: mod_base = OTHER; note = 2'-O-methylcytidine-3'-phosphate
  modified_base 14: mod_base = OTHER; note = 2'-fluoroadenosine-3'-phosphate
  modified_base 15: mod_base = OTHER; note = 2'-O-methylguanosine-3'-phosphate
  modified_base 16: mod_base = OTHER; note = 2'-O-methylguanosine-3'-phosphate
  modified_base 17: mod_base = OTHER; note = 2'-O-methyluridine-3'-phosphate
  modified_base 18: mod_base = OTHER; note = 2'-fluorocytidine-3'-phosphate
  modified_base 19: mod_base = OTHER; note = 2'-O-methyluridine-3'-phosphate
  modified_base 20: mod_base = OTHER; note = 2'-fluoroadenosine-3'-phosphate
  modified_base 21: mod_base = OTHER; note = 2'-O-methylguanosine-3'-phosphorothioate
  modified_base 22: mod_base = OTHER; note = 2'-O-methyladenosine-3'-phosphorothioate
  modified_base 23: mod_base = OTHER; note = 2'-O-methyladenosine-3'-phosphate
acaaaagcaaaacaggtctagaa

SEQ ID NO: 485 - RNA, 21 nt, synthetic construct
  source 1..21: mol_type = other RNA; note = Description of Artificial Sequence: Synthetic oligonucleotide
  modified_base 1: mod_base = OTHER; note = 2'-fluorocytidine-3'-phosphate
  modified_base 2: mod_base = OTHER; note = 2'-O-methyluridine-3'-phosphate
  modified_base 3: mod_base = OTHER; note = 2'-O-methyladenosine-3'-phosphate
  modified_base 4: mod_base = OTHER; note = 2'-O-methylguanosine-3'-phosphate
  modified_base 5: mod_base = OTHER; note = 2'-fluoroadenosine-3'-phosphate
  modified_base 6: mod_base = OTHER; note = 2'-O-methylcytidine-3'-phosphate
  modified_base 7: mod_base = OTHER; note = 2'-fluorocytidine-3'-phosphate
  modified_base 8: mod_base = OTHER; note = 2'-O-methyluridine-3'-phosphate
  modified_base 9: mod_base = OTHER; note = 2'-fluoroguanosine-3'-phosphate
  modified_base 10: mod_base = OTHER; note = 2'-fluorouridine-3'-phosphate
  modified_base 11: mod_base = OTHER; note = 2'-fluorouridine-3'-phosphate
  modified_base 12: mod_base = OTHER; note = 2'-O-methyluridine-3'-phosphate
  modified_base 13: mod_base = OTHER; note = 2'-fluorouridine-3'-phosphate
  modified_base 14: mod_base = OTHER; note = 2'-O-methylguanosine-3'-phosphate
  modified_base 15: mod_base = OTHER; note = 2'-O-methylcytidine-3'-phosphate
  modified_base 16: mod_base = OTHER; note = 2'-O-methyluridine-3'-phosphate
  modified_base 17: mod_base = OTHER; note = 2'-fluorouridine-3'-phosphate
  modified_base 18: mod_base = OTHER; note = 2'-O-methyluridine-3'-phosphate
  modified_base 19: mod_base = OTHER; note = 2'-fluorouridine-3'-phosphate
  modified_base 20: mod_base = OTHER; note = 2'-O-methylguanosine-3'-phosphate
  modified_base 21: mod_base = OTHER; note = 2'-O-methyluridine-3'-phosphate N-[tris(GalNAc-alkyl)-amidodecanoyl)]-4-hydroxyprolinol Hyp-(GalNAc-alkyl)3
ctagacctgttttgcttttgt

SEQ ID NO: 486 - RNA, 23 nt, synthetic construct
  source 1..23: mol_type = other RNA; note = Description of Artificial Sequence: Synthetic oligonucleotide
  modified_base 1: mod_base = OTHER; note = 2'-O-methyladenosine-3'-phosphate
  modified_base 2: mod_base = OTHER; note = 2'-fluorocytidine-3'-phosphate
  modified_base 3: mod_base = OTHER; note = 2'-O-methyladenosine-3'-phosphate
  modified_base 4: mod_base = OTHER; note = 2'-O-methyladenosine-3'-phosphate
  modified_base 5: mod_base = OTHER; note = 2'-O-methyladenosine-3'-phosphate
  modified_base 6: mod_base = OTHER; note = 2'-fluoroadenosine-3'-phosphate
  modified_base 7: mod_base = OTHER; note = 2'-O-methylguanosine-3'-phosphate
  modified_base 8: mod_base = OTHER; note = 2'-fluorocytidine-3'-phosphate
  modified_base 9: mod_base = OTHER; note = 2'-O-methyladenosine-3'-phosphate
  modified_base 10: mod_base = OTHER; note = 2'-fluoroadenosine-3'-phosphate
  modified_base 11: mod_base = OTHER; note = 2'-O-methyladenosine-3'-phosphate
  modified_base 12: mod_base = OTHER; note = 2'-O-methyladenosine-3'-phosphate
  modified_base 13: mod_base = OTHER; note = 2'-O-methylcytidine-3'-phosphate
  modified_base 14: mod_base = OTHER; note = 2'-fluoroadenosine-3'-phosphate
  modified_base 15: mod_base = OTHER; note = 2'-O-methylguanosine-3'-phosphate
  modified_base 16: mod_base = OTHER; note = 2'-O-methylguanosine-3'-phosphate
  modified_base 17: mod_base = OTHER; note = 2'-O-methyluridine-3'-phosphate
  modified_base 18: mod_base = OTHER; note = 2'-fluorocytidine-3'-phosphate
  modified_base 19: mod_base = OTHER; note = 2'-O-methyluridine-3'-phosphate
  modified_base 20: mod_base = OTHER; note = 2'-fluoroadenosine-3'-phosphate
  modified_base 21: mod_base = OTHER; note = 2'-O-methylguanosine-3'-phosphorothioate
  modified_base 22: mod_base = OTHER; note = 2'-O-methyladenosine-3'-phosphorothioate
  modified_base 23: mod_base = OTHER; note = 2'-O-methyladenosine-3'-phosphate
acaaaagcaaaacaggtctagaa

SEQ ID NO: 487 - RNA, 21 nt, synthetic construct
  source 1..21: mol_type = other RNA; note = Description of Artificial Sequence: Synthetic oligonucleotide
  modified_base 1: mod_base = OTHER; note = 2'-fluorocytidine-3'-phosphate
  modified_base 2: mod_base = OTHER; note = 2'-O-methyluridine-3'-phosphate
  modified_base 3: mod_base = OTHER; note = 2'-O-methyladenosine-3'-phosphate
  modified_base 4: mod_base = OTHER; note = 2'-O-methylguanosine-3'-phosphate
  modified_base 5: mod_base = OTHER; note = 2'-fluoroadenosine-3'-phosphate
  modified_base 6: mod_base = OTHER; note = 2'-O-methylcytidine-3'-phosphate
  modified_base 7: mod_base = OTHER; note = 2'-O-methylcytidine-3'-phosphate
  modified_base 8: mod_base = OTHER; note = 2'-O-methyluridine-3'-phosphate
  modified_base 9: mod_base = OTHER; note = 2'-fluoroguanosine-3'-phosphate
  modified_base 10: mod_base = OTHER; note = 2'-fluorouridine-3'-phosphate
  modified_base 11: mod_base = OTHER; note = 2'-fluorouridine-3'-phosphate
  modified_base 12: mod_base = OTHER; note = 2'-O-methyluridine-3'-phosphate
  modified_base 13: mod_base = OTHER; note = 2'-fluorouridine-3'-phosphate
  modified_base 14: mod_base = OTHER; note = 2'-O-methylguanosine-3'-phosphate
  modified_base 15: mod_base = OTHER; note = 2'-O-methylcytidine-3'-phosphate
  modified_base 16: mod_base = OTHER; note = 2'-O-methyluridine-3'-phosphate
  modified_base 17: mod_base = OTHER; note = 2'-fluorouridine-3'-phosphate
  modified_base 18: mod_base = OTHER; note = 2'-O-methyluridine-3'-phosphate
  modified_base 19: mod_base = OTHER; note = 2'-fluorouridine-3'-phosphate
  modified_base 20: mod_base = OTHER; note = 2'-O-methylguanosine-3'-phosphate
  modified_base 21: mod_base = OTHER; note = 2'-O-methyluridine-3'-phosphate N-[tris(GalNAc-alkyl)-amidodecanoyl)]-4-hydroxyprolinol Hyp-(GalNAc-alkyl)3
ctagacctgttttgcttttgt

SEQ ID NO: 488 - RNA, 23 nt, synthetic construct
  source 1..23: mol_type = other RNA; note = Description of Artificial Sequence: Synthetic oligonucleotide
  modified_base 1: mod_base = OTHER; note = 2'-O-methyladenosine-3'-phosphate
  modified_base 2: mod_base = OTHER; note = 2'-fluorocytidine-3'-phosphate
  modified_base 3: mod_base = OTHER; note = 2'-O-methyladenosine-3'-phosphate
  modified_base 4: mod_base = OTHER; note = 2'-O-methyladenosine-3'-phosphate
  modified_base 5: mod_base = OTHER; note = 2'-O-methyladenosine-3'-phosphate
  modified_base 6: mod_base = OTHER; note = 2'-fluoroadenosine-3'-phosphate
  modified_base 7: mod_base = OTHER; note = 2'-O-methylguanosine-3'-phosphate
  modified_base 8: mod_base = OTHER; note = 2'-fluorocytidine-3'-phosphate
  modified_base 9: mod_base = OTHER; note = 2'-O-methyladenosine-3'-phosphate
  modified_base 10: mod_base = OTHER; note = 2'-fluoroadenosine-3'-phosphate
  modified_base 11: mod_base = OTHER; note = 2'-O-methyladenosine-3'-phosphate
  modified_base 12: mod_base = OTHER; note = 2'-O-methyladenosine-3'-phosphate
  modified_base 13: mod_base = OTHER; note = 2'-O-methylcytidine-3'-phosphate
  modified_base 14: mod_base = OTHER; note = 2'-fluoroadenosine-3'-phosphate
  modified_base 15: mod_base = OTHER; note = 2'-O-methylguanosine-3'-phosphate
  modified_base 16: mod_base = OTHER; note = 2'-O-methylguanosine-3'-phosphate
  modified_base 17: mod_base = OTHER; note = 2'-O-methyluridine-3'-phosphate
  modified_base 18: mod_base = OTHER; note = 2'-fluorocytidine-3'-phosphate
  modified_base 19: mod_base = OTHER; note = 2'-O-methyluridine-3'-phosphate
  modified_base 20: mod_base = OTHER; note = 2'-fluoroadenosine-3'-phosphate
  modified_base 21: mod_base = OTHER; note = 2'-O-methylguanosine-3'-phosphorothioate
  modified_base 22: mod_base = OTHER; note = 2'-O-methyladenosine-3'-phosphorothioate
  modified_base 23: mod_base = OTHER; note = 2'-O-methyladenosine-3'-phosphate
acaaaagcaaaacaggtctagaa

SEQ ID NO: 489 - RNA, 21 nt, synthetic construct
  source 1..21: mol_type = other RNA; note = Description of Artificial Sequence: Synthetic oligonucleotide
  modified_base 1: mod_base = OTHER; note = 2'-fluorocytidine-3'-phosphate
  modified_base 2: mod_base = OTHER; note = 2'-O-methyluridine-3'-phosphate
  modified_base 3: mod_base = OTHER; note = 2'-O-methyladenosine-3'-phosphate
  modified_base 4: mod_base = OTHER; note = 2'-O-methylguanosine-3'-phosphate
  modified_base 5: mod_base = OTHER; note = 2'-fluoroadenosine-3'-phosphate
  modified_base 6: mod_base = OTHER; note = 2'-O-methylcytidine-3'-phosphate
  modified_base 7: mod_base = OTHER; note = 2'-O-methylcytidine-3'-phosphate
  modified_base 8: mod_base = OTHER; note = 2'-O-methyluridine-3'-phosphate
  modified_base 9: mod_base = OTHER; note = 2'-fluoroguanosine-3'-phosphate
  modified_base 10: mod_base = OTHER; note = 2'-fluorouridine-3'-phosphate
  modified_base 11: mod_base = OTHER; note = 2'-fluorouridine-3'-phosphate
  modified_base 12: mod_base = OTHER; note = 2'-O-methyluridine-3'-phosphate
  modified_base 13: mod_base = OTHER; note = 2'-O-methyluridine-3'-phosphate
  modified_base 14: mod_base = OTHER; note = 2'-O-methylguanosine-3'-phosphate
  modified_base 15: mod_base = OTHER; note = 2'-O-methylcytidine-3'-phosphate
  modified_base 16: mod_base = OTHER; note = 2'-O-methyluridine-3'-phosphate
  modified_base 17: mod_base = OTHER; note = 2'-fluorouridine-3'-phosphate
  modified_base 18: mod_base = OTHER; note = 2'-O-methyluridine-3'-phosphate
  modified_base 19: mod_base = OTHER; note = 2'-O-methyluridine-3'-phosphate
  modified_base 20: mod_base = OTHER; note = 2'-O-methylguanosine-3'-phosphate
  modified_base 21: mod_base = OTHER; note = 2'-O-methyluridine-3'-phosphate N-[tris(GalNAc-alkyl)-amidodecanoyl)]-4-hydroxyprolinol Hyp-(GalNAc-alkyl)3
ctagacctgttttgcttttgt

SEQ ID NO: 490 - RNA, 23 nt, synthetic construct
  source 1..23: mol_type = other RNA; note = Description of Artificial Sequence: Synthetic oligonucleotide
  modified_base 1: mod_base = OTHER; note = 2'-O-methyladenosine-3'-phosphate
  modified_base 2: mod_base = OTHER; note = 2'-fluorocytidine-3'-phosphate
  modified_base 3: mod_base = OTHER; note = 2'-O-methyladenosine-3'-phosphate
  modified_base 4: mod_base = OTHER; note = 2'-O-methyladenosine-3'-phosphate
  modified_base 5: mod_base = OTHER; note = 2'-O-methyladenosine-3'-phosphate
  modified_base 6: mod_base = OTHER; note = 2'-fluoroadenosine-3'-phosphate
  modified_base 7: mod_base = OTHER; note = 2'-O-methylguanosine-3'-phosphate
  modified_base 8: mod_base = OTHER; note = 2'-fluorocytidine-3'-phosphate
  modified_base 9: mod_base = OTHER; note = 2'-O-methyladenosine-3'-phosphate
  modified_base 10: mod_base = OTHER; note = 2'-fluoroadenosine-3'-phosphate
  modified_base 11: mod_base = OTHER; note = 2'-O-methyladenosine-3'-phosphate
  modified_base 12: mod_base = OTHER; note = 2'-O-methyladenosine-3'-phosphate
  modified_base 13: mod_base = OTHER; note = 2'-O-methylcytidine-3'-phosphate
  modified_base 14: mod_base = OTHER; note = 2'-fluoroadenosine-3'-phosphate
  modified_base 15: mod_base = OTHER; note = 2'-O-methylguanosine-3'-phosphate
  modified_base 16: mod_base = OTHER; note = 2'-O-methylguanosine-3'-phosphate
  modified_base 17: mod_base = OTHER; note = 2'-O-methyluridine-3'-phosphate
  modified_base 18: mod_base = OTHER; note = 2'-fluorocytidine-3'-phosphate
  modified_base 19: mod_base = OTHER; note = 2'-O-methyluridine-3'-phosphate
  modified_base 20: mod_base = OTHER; note = 2'-fluoroadenosine-3'-phosphate
  modified_base 21: mod_base = OTHER; note = 2'-O-methylguanosine-3'-phosphorothioate
  modified_base 22: mod_base = OTHER; note = 2'-O-methyladenosine-3'-phosphorothioate
  modified_base 23: mod_base = OTHER; note = 2'-O-methyladenosine-3'-phosphate
acaaaagcaaaacaggtctagaa

SEQ ID NO: 491 - RNA, 21 nt, synthetic construct
  source 1..21: mol_type = other RNA; note = Description of Artificial Sequence: Synthetic oligonucleotide
  modified_base 1: mod_base = OTHER; note = 2'-fluorocytidine-3'-phosphate
  modified_base 2: mod_base = OTHER; note = 2'-O-methyluridine-3'-phosphate
  modified_base 3: mod_base = OTHER; note = 2'-O-methyladenosine-3'-phosphate
  modified_base 4: mod_base = OTHER; note = 2'-O-methylguanosine-3'-phosphate
  modified_base 5: mod_base = OTHER; note = 2'-O-methyladenosine-3'-phosphate
  modified_base 6: mod_base = OTHER; note = 2'-O-methylcytidine-3'-phosphate
  modified_base 7: mod_base = OTHER; note = 2'-O-methylcytidine-3'-phosphate
  modified_base 8: mod_base = OTHER; note = 2'-O-methyluridine-3'-phosphate
  modified_base 9: mod_base = OTHER; note = 2'-fluoroguanosine-3'-phosphate
  modified_base 10: mod_base = OTHER; note = 2'-fluorouridine-3'-phosphate
  modified_base 11: mod_base = OTHER; note = 2'-fluorouridine-3'-phosphate
  modified_base 12: mod_base = OTHER; note = 2'-O-methyluridine-3'-phosphate
  modified_base 13: mod_base = OTHER; note = 2'-O-methyluridine-3'-phosphate
  modified_base 14: mod_base = OTHER; note = 2'-O-methylguanosine-3'-phosphate
  modified_base 15: mod_base = OTHER; note = 2'-O-methylcytidine-3'-phosphate
  modified_base 16: mod_base = OTHER; note = 2'-O-methyluridine-3'-phosphate
  modified_base 17: mod_base = OTHER; note = 2'-O-methyluridine-3'-phosphate
  modified_base 18: mod_base = OTHER; note = 2'-O-methyluridine-3'-phosphate
  modified_base 19: mod_base = OTHER; note = 2'-O-methyluridine-3'-phosphate
  modified_base 20: mod_base = OTHER; note = 2'-O-methylguanosine-3'-phosphate
  modified_base 21: mod_base = OTHER; note = 2'-O-methyluridine-3'-phosphate N-[tris(GalNAc-alkyl)-amidodecanoyl)]-4-hydroxyprolinol Hyp-(GalNAc-alkyl)3
ctagacctgttttgcttttgt

SEQ ID NO: 492 - RNA, 23 nt, synthetic construct
  source 1..23: mol_type = other RNA; note = Description of Artificial Sequence: Synthetic oligonucleotide
  modified_base 1: mod_base = OTHER; note = 2'-O-methyladenosine-3'-phosphate
  modified_base 2: mod_base = OTHER; note = 2'-fluorocytidine-3'-phosphate
  modified_base 3: mod_base = OTHER; note = 2'-O-methyladenosine-3'-phosphate
  modified_base 4: mod_base = OTHER; note = 2'-O-methyladenosine-3'-phosphate
  modified_base 5: mod_base = OTHER; note = 2'-O-methyladenosine-3'-phosphate
  modified_base 6: mod_base = OTHER; note = 2'-fluoroadenosine-3'-phosphate
  modified_base 7: mod_base = OTHER; note = 2'-O-methylguanosine-3'-phosphate
  modified_base 8: mod_base = OTHER; note = 2'-fluorocytidine-3'-phosphate
  modified_base 9: mod_base = OTHER; note = 2'-O-methyladenosine-3'-phosphate
  modified_base 10: mod_base = OTHER; note = 2'-fluoroadenosine-3'-phosphate
  modified_base 11: mod_base = OTHER; note = 2'-O-methyladenosine-3'-phosphate
  modified_base 12: mod_base = OTHER; note = 2'-O-methyladenosine-3'-phosphate
  modified_base 13: mod_base = OTHER; note = 2'-O-methylcytidine-3'-phosphate
  modified_base 14: mod_base = OTHER; note = 2'-fluoroadenosine-3'-phosphate
  modified_base 15: mod_base = OTHER; note = 2'-O-methylguanosine-3'-phosphate
  modified_base 16: mod_base = OTHER; note = 2'-O-methylguanosine-3'-phosphate
  modified_base 17: mod_base = OTHER; note = 2'-O-methyluridine-3'-phosphate
  modified_base 18: mod_base = OTHER; note = 2'-fluorocytidine-3'-phosphate
  modified_base 19: mod_base = OTHER; note = 2'-O-methyluridine-3'-phosphate
  modified_base 20: mod_base = OTHER; note = 2'-fluoroadenosine-3'-phosphate
  modified_base 21: mod_base = OTHER; note = 2'-O-methylguanosine-3'-phosphorothioate
  modified_base 22: mod_base = OTHER; note = 2'-O-methyladenosine-3'-phosphorothioate
  modified_base 23: mod_base = OTHER; note = 2'-O-methyladenosine-3'-phosphate
acaaaagcaaaacaggtctagaa

SEQ ID NO: 493 - RNA, 21 nt, synthetic construct
  source 1..21: mol_type = other RNA; note = Description of Artificial Sequence: Synthetic oligonucleotide
  modified_base 1: mod_base = OTHER; note = 2'-fluorocytidine-3'-phosphate
  modified_base 2: mod_base = OTHER; note = 2'-O-methyluridine-3'-phosphate
  modified_base 3: mod_base = OTHER; note = 2'-fluoroadenosine-3'-phosphate
  modified_base 4: mod_base = OTHER; note = 2'-O-methylguanosine-3'-phosphate
  modified_base 5: mod_base = OTHER; note = 2'-fluoroadenosine-3'-phosphate
  modified_base 6: mod_base = OTHER; note = 2'-O-methylcytidine-3'-phosphate
  modified_base 7: mod_base = OTHER; note = 2'-fluorocytidine-3'-phosphate
  modified_base 8: mod_base = OTHER; note = 2'-O-methyluridine-3'-phosphate
  modified_base 9: mod_base = OTHER; note = 2'-fluoroguanosine-3'-phosphate
  modified_base 10: mod_base = OTHER; note = 2'-fluorouridine-3'-phosphate
  modified_base 11: mod_base = OTHER; note = 2'-fluorouridine-3'-phosphate
  modified_base 12: mod_base = OTHER; note = 2'-O-methyluridine-3'-phosphate
  modified_base 13: mod_base = OTHER; note = 2'-fluorouridine-3'-phosphate
  modified_base 14: mod_base = OTHER; note = 2'-O-methylguanosine-3'-phosphate
  modified_base 15: mod_base = OTHER; note = 2'-fluorocytidine-3'-phosphate
  modified_base 16: mod_base = OTHER; note = 2'-O-methyluridine-3'-phosphate
  modified_base 17: mod_base = OTHER; note = 2'-fluorouridine-3'-phosphate
  modified_base 18: mod_base = OTHER; note = 2'-O-methyluridine-3'-phosphate
  modified_base 19: mod_base = OTHER; note = 2'-fluorouridine-3'-phosphate
  modified_base 20: mod_base = OTHER; note = 2'-O-methylguanosine-3'-phosphate
  modified_base 21: mod_base = OTHER; note = 2'-fluorouridine-3'-phosphate N-[tris(GalNAc-alkyl)-amidodecanoyl)]-4-hydroxyprolinol Hyp-(GalNAc-alkyl)3
ctagacctgttttgcttttgt

SEQ ID NO: 494 - RNA, 23 nt, synthetic construct
  source 1..23: mol_type = other RNA; note = Description of Artificial Sequence: Synthetic oligonucleotide
  modified_base 1: mod_base = OTHER; note = 2'-O-methyladenosine-3'-phosphate
  modified_base 2: mod_base = OTHER; note = 2'-fluorocytidine-3'-phosphate
  modified_base 3: mod_base = OTHER; note = 2'-O-methyladenosine-3'-phosphate
  modified_base 4: mod_base = OTHER; note = 2'-fluoroadenosine-3'-phosphate
  modified_base 5: mod_base = OTHER; note = 2'-fluoroadenosine-3'-phosphate
  modified_base 6: mod_base = OTHER; note = 2'-fluoroadenosine-3'-phosphate
  modified_base 7: mod_base = OTHER; note = 2'-O-methylguanosine-3'-phosphate
  modified_base 8: mod_base = OTHER; note = 2'-fluorocytidine-3'-phosphate
  modified_base 9: mod_base = OTHER; note = 2'-O-methyladenosine-3'-phosphate
  modified_base 10: mod_base = OTHER; note = 2'-fluoroadenosine-3'-phosphate
  modified_base 11: mod_base = OTHER; note = 2'-O-methyladenosine-3'-phosphate
  modified_base 12: mod_base = OTHER; note = 2'-O-methyladenosine-3'-phosphate
  modified_base 13: mod_base = OTHER; note = 2'-O-methylcytidine-3'-phosphate
  modified_base 14: mod_base = OTHER; note = 2'-fluoroadenosine-3'-phosphate
  modified_base 15: mod_base = OTHER; note = 2'-O-methylguanosine-3'-phosphate
  modified_base 16: mod_base = OTHER; note = 2'-fluoroguanosine-3'-phosphate
  modified_base 17: mod_base = OTHER; note = 2'-fluorouridine-3'-phosphate
  modified_base 18: mod_base = OTHER; note = 2'-fluorocytidine-3'-phosphate
  modified_base 19: mod_base = OTHER; note = 2'-O-methyluridine-3'-phosphate
  modified_base 20: mod_base = OTHER; note = 2'-fluoroadenosine-3'-phosphate
  modified_base 21: mod_base = OTHER; note = 2'-O-methylguanosine-3'-phosphorothioate
  modified_base 22: mod_base = OTHER; note = 2'-fluoroadenosine-3'-phosphorothioate
  modified_base 23: mod_base = OTHER; note = 2'-O-methyladenosine-3'-phosphate
acaaaagcaaaacaggtctagaa

SEQ ID NO: 495 - RNA, 21 nt, synthetic construct
  source 1..21: mol_type = other RNA; note = Description of Artificial Sequence: Synthetic oligonucleotide
  modified_base 1: mod_base = OTHER; note = 2'-fluorocytidine-3'-phosphate
  modified_base 2: mod_base = OTHER; note = 2'-O-methyluridine-3'-phosphate
  modified_base 3: mod_base = OTHER; note = 2'-fluoroadenosine-3'-phosphate
  modified_base 4: mod_base = OTHER; note = 2'-fluoroguanosine-3'-phosphate
  modified_base 5: mod_base = OTHER; note = 2'-fluoroadenosine-3'-phosphate
  modified_base 6: mod_base = OTHER; note = 2'-O-methylcytidine-3'-phosphate
  modified_base 7: mod_base = OTHER; note = 2'-fluorocytidine-3'-phosphate
  modified_base 8: mod_base = OTHER; note = 2'-O-methyluridine-3'-phosphate
  modified_base 9: mod_base = OTHER; note = 2'-fluoroguanosine-3'-phosphate
  modified_base 10: mod_base = OTHER; note = 2'-fluorouridine-3'-phosphate
  modified_base 11: mod_base = OTHER; note = 2'-fluorouridine-3'-phosphate
  modified_base 12: mod_base = OTHER; note = 2'-O-methyluridine-3'-phosphate
  modified_base 13: mod_base = OTHER; note = 2'-fluorouridine-3'-phosphate
  modified_base 14: mod_base = OTHER; note = 2'-O-methylguanosine-3'-phosphate
  modified_base 15: mod_base = OTHER; note = 2'-fluorocytidine-3'-phosphate
  modified_base 16: mod_base = OTHER; note = 2'-O-methyluridine-3'-phosphate
  modified_base 17: mod_base = OTHER; note = 2'-fluorouridine-3'-phosphate
  modified_base 18: mod_base = OTHER; note = 2'-O-methyluridine-3'-phosphate
  modified_base 19: mod_base = OTHER; note = 2'-fluorouridine-3'-phosphate
  modified_base 20: mod_base = OTHER; note = 2'-O-methylguanosine-3'-phosphate
  modified_base 21: mod_base = OTHER; note = 2'-fluorouridine-3'-phosphate N-[tris(GalNAc-alkyl)-amidodecanoyl)]-4-hydroxyprolinol Hyp-(GalNAc-alkyl)3
ctagacctgttttgcttttgt

SEQ ID NO: 496 - RNA, 23 nt, synthetic construct
  source 1..23: mol_type = other RNA; note = Description of Artificial Sequence: Synthetic oligonucleotide
  modified_base 1: mod_base = OTHER; note = 2'-O-methyladenosine-3'-phosphate
  modified_base 2: mod_base = OTHER; note = 2'-fluorocytidine-3'-phosphate
  modified_base 3: mod_base = OTHER; note = 2'-O-methyladenosine-3'-phosphate
  modified_base 4: mod_base = OTHER; note = 2'-fluoroadenosine-3'-phosphate
  modified_base 5: mod_base = OTHER; note = 2'-fluoroadenosine-3'-phosphate
  modified_base 6: mod_base = OTHER; note = 2'-fluoroadenosine-3'-phosphate
  modified_base 7: mod_base = OTHER; note = 2'-O-methylguanosine-3'-phosphate
  modified_base 8: mod_base = OTHER; note = 2'-fluorocytidine-3'-phosphate
  modified_base 9: mod_base = OTHER; note = 2'-O-methyladenosine-3'-phosphate
  modified_base 10: mod_base = OTHER; note = 2'-fluoroadenosine-3'-phosphate
  modified_base 11: mod_base = OTHER; note = 2'-O-methyladenosine-3'-phosphate
  modified_base 12: mod_base = OTHER; note = 2'-O-methyladenosine-3'-phosphate
  modified_base 13: mod_base = OTHER; note = 2'-O-methylcytidine-3'-phosphate
  modified_base 14: mod_base = OTHER; note = 2'-fluoroadenosine-3'-phosphate
  modified_base 15: mod_base = OTHER; note = 2'-O-methylguanosine-3'-phosphate
  modified_base 16: mod_base = OTHER; note = 2'-fluoroguanosine-3'-phosphate
  modified_base 17: mod_base = OTHER; note = 2'-fluorouridine-3'-phosphate
  modified_base 18: mod_base = OTHER; note = 2'-fluorocytidine-3'-phosphate
  modified_base 19: mod_base = OTHER; note = 2'-O-methyluridine-3'-phosphate
  modified_base 20: mod_base = OTHER; note = 2'-fluoroadenosine-3'-phosphate
  modified_base 21: mod_base = OTHER; note = 2'-O-methylguanosine-3'-phosphorothioate
  modified_base 22: mod_base = OTHER; note = 2'-fluoroadenosine-3'-phosphorothioate
  modified_base 23: mod_base = OTHER; note = 2'-O-methyladenosine-3'-phosphate
acaaaagcaaaacaggtctagaa

SEQ ID NO: 497 - RNA, 21 nt, synthetic construct
  source 1..21: mol_type = other RNA; note = Description of Artificial Sequence: Synthetic oligonucleotide
  modified_base 1: mod_base = OTHER; note = 2'-fluorocytidine-3'-phosphate
  modified_base 2: mod_base = OTHER; note = 2'-O-methyluridine-3'-phosphate
  modified_base 3: mod_base = OTHER; note = 2'-fluoroadenosine-3'-phosphate
  modified_base 4: mod_base = OTHER; note = 2'-fluoroguanosine-3'-phosphate
  modified_base 5: mod_base = OTHER; note = 2'-fluoroadenosine-3'-phosphate
  modified_base 6: mod_base = OTHER; note = 2'-O-methylcytidine-3'-phosphate
  modified_base 7: mod_base = OTHER; note = 2'-fluorocytidine-3'-phosphate
  modified_base 8: mod_base = OTHER; note = 2'-O-methyluridine-3'-phosphate
  modified_base 9: mod_base = OTHER; note = 2'-fluoroguanosine-3'-phosphate
  modified_base 10: mod_base = OTHER; note = 2'-fluorouridine-3'-phosphate
  modified_base 11: mod_base = OTHER; note = 2'-fluorouridine-3'-phosphate
  modified_base 12: mod_base = OTHER; note = 2'-O-methyluridine-3'-phosphate
  modified_base 13: mod_base = OTHER; note = 2'-fluorouridine-3'-phosphate
  modified_base 14: mod_base = OTHER; note = 2'-fluoroguanosine-3'-phosphate
  modified_base 15: mod_base = OTHER; note = 2'-fluorocytidine-3'-phosphate
  modified_base 16: mod_base = OTHER; note = 2'-O-methyluridine-3'-phosphate
  modified_base 17: mod_base = OTHER; note = 2'-fluorouridine-3'-phosphate
  modified_base 18: mod_base = OTHER; note = 2'-O-methyluridine-3'-phosphate
  modified_base 19: mod_base = OTHER; note = 2'-fluorouridine-3'-phosphate
  modified_base 20: mod_base = OTHER; note = 2'-O-methylguanosine-3'-phosphate
  modified_base 21: mod_base = OTHER; note = 2'-fluorouridine-3'-phosphate N-[tris(GalNAc-alkyl)-amidodecanoyl)]-4-hydroxyprolinol Hyp-(GalNAc-alkyl)3
ctagacctgttttgcttttgt

SEQ ID NO: 498 - RNA, 23 nt, synthetic construct
  source 1..23: mol_type = other RNA; note = Description of Artificial Sequence: Synthetic oligonucleotide
  modified_base 1: mod_base = OTHER; note = 2'-O-methyladenosine-3'-phosphate
  modified_base 2: mod_base = OTHER; note = 2'-fluorocytidine-3'-phosphate
  modified_base 3: mod_base = OTHER; note = 2'-O-methyladenosine-3'-phosphate
  modified_base 4: mod_base = OTHER; note = 2'-fluoroadenosine-3'-phosphate
  modified_base 5: mod_base = OTHER; note = 2'-fluoroadenosine-3'-phosphate
  modified_base 6: mod_base = OTHER; note = 2'-fluoroadenosine-3'-phosphate
  modified_base 7: mod_base = OTHER; note = 2'-O-methylguanosine-3'-phosphate
  modified_base 8: mod_base = OTHER; note = 2'-fluorocytidine-3'-phosphate
  modified_base 9: mod_base = OTHER; note = 2'-O-methyladenosine-3'-phosphate
  modified_base 10: mod_base = OTHER; note = 2'-fluoroadenosine-3'-phosphate
  modified_base 11: mod_base = OTHER; note = 2'-O-methyladenosine-3'-phosphate
  modified_base 12: mod_base = OTHER; note = 2'-O-methyladenosine-3'-phosphate
  modified_base 13: mod_base = OTHER; note = 2'-O-methylcytidine-3'-phosphate
  modified_base 14: mod_base = OTHER; note = 2'-fluoroadenosine-3'-phosphate
  modified_base 15: mod_base = OTHER; note = 2'-O-methylguanosine-3'-phosphate
  modified_base 16: mod_base = OTHER; note = 2'-fluoroguanosine-3'-phosphate
  modified_base 17: mod_base = OTHER; note = 2'-fluorouridine-3'-phosphate
  modified_base 18: mod_base = OTHER; note = 2'-fluorocytidine-3'-phosphate
  modified_base 19: mod_base = OTHER; note = 2'-O-methyluridine-3'-phosphate
  modified_base 20: mod_base = OTHER; note = 2'-fluoroadenosine-3'-phosphate
  modified_base 21: mod_base = OTHER; note = 2'-O-methylguanosine-3'-phosphorothioate
  modified_base 22: mod_base = OTHER; note = 2'-fluoroadenosine-3'-phosphorothioate
  modified_base 23: mod_base = OTHER; note = 2'-O-methyladenosine-3'-phosphate
acaaaagcaaaacaggtctagaa

SEQ ID NO: 499 - RNA, 21 nt, synthetic construct
  source 1..21: mol_type = other RNA; note = Description of Artificial Sequence: Synthetic oligonucleotide
  modified_base 1: mod_base = OTHER; note = 2'-fluorocytidine-3'-phosphate
  modified_base 2: mod_base = OTHER; note = 2'-O-methyluridine-3'-phosphate
  modified_base 3: mod_base = OTHER; note = 2'-fluoroadenosine-3'-phosphate
  modified_base 4: mod_base = OTHER; note = 2'-fluoroguanosine-3'-phosphate
  modified_base 5: mod_base = OTHER; note = 2'-fluoroadenosine-3'-phosphate
  modified_base 6: mod_base = OTHER; note = 2'-O-methylcytidine-3'-phosphate
  modified_base 7: mod_base = OTHER; note = 2'-fluorocytidine-3'-phosphate
  modified_base 8: mod_base = OTHER; note = 2'-O-methyluridine-3'-phosphate
  modified_base 9: mod_base = OTHER; note = 2'-fluoroguanosine-3'-phosphate
  modified_base 10: mod_base = OTHER; note = 2'-fluorouridine-3'-phosphate
  modified_base 11: mod_base = OTHER; note = 2'-fluorouridine-3'-phosphate
  modified_base 12: mod_base = OTHER; note = 2'-O-methyluridine-3'-phosphate
  modified_base 13: mod_base = OTHER; note = 2'-fluorouridine-3'-phosphate
  modified_base 14: mod_base = OTHER; note = 2'-fluoroguanosine-3'-phosphate
  modified_base 15: mod_base = OTHER; note = 2'-fluorocytidine-3'-phosphate
  modified_base 16: mod_base = OTHER; note = 2'-O-methyluridine-3'-phosphate
  modified_base 17: mod_base = OTHER; note = 2'-fluorouridine-3'-phosphate
  modified_base 18: mod_base = OTHER; note = 2'-fluorouridine-3'-phosphate
  modified_base 19: mod_base = OTHER; note = 2'-fluorouridine-3'-phosphate
  modified_base 20: mod_base = OTHER; note = 2'-O-methylguanosine-3'-phosphate
  modified_base 21: mod_base = OTHER; note = 2'-fluorouridine-3'-phosphate N-[tris(GalNAc-alkyl)-amidodecanoyl)]-4-hydroxyprolinol Hyp-(GalNAc-alkyl)3
ctagacctgttttgcttttgt

SEQ ID NO: 500 - RNA, 23 nt, synthetic construct
  source 1..23: mol_type = other RNA; note = Description of Artificial Sequence: Synthetic oligonucleotide
  modified_base 1: mod_base = OTHER; note = 2'-O-methyladenosine-3'-phosphate
  modified_base 2: mod_base = OTHER; note = 2'-fluorocytidine-3'-phosphate
  modified_base 3: mod_base = OTHER; note = 2'-O-methyladenosine-3'-phosphate
  modified_base 4: mod_base = OTHER; note = 2'-fluoroadenosine-3'-phosphate
  modified_base 5: mod_base = OTHER; note = 2'-fluoroadenosine-3'-phosphate
  modified_base 6: mod_base = OTHER; note = 2'-fluoroadenosine-3'-phosphate
  modified_base 7: mod_base = OTHER; note = 2'-O-methylguanosine-3'-phosphate
  modified_base 8: mod_base = OTHER; note = 2'-fluorocytidine-3'-phosphate
  modified_base 9: mod_base = OTHER; note = 2'-O-methyladenosine-3'-phosphate
  modified_base 10: mod_base = OTHER; note = 2'-fluoroadenosine-3'-phosphate
  modified_base 11: mod_base = OTHER; note = 2'-O-methyladenosine-3'-phosphate
  modified_base 12: mod_base = OTHER; note = 2'-O-methyladenosine-3'-phosphate
  modified_base 13: mod_base = OTHER; note = 2'-O-methylcytidine-3'-phosphate
  modified_base 14: mod_base = OTHER; note = 2'-fluoroadenosine-3'-phosphate
  modified_base 15: mod_base = OTHER; note = 2'-O-methylguanosine-3'-phosphate
  modified_base 16: mod_base = OTHER; note = 2'-fluoroguanosine-3'-phosphate
  modified_base 17: mod_base = OTHER; note = 2'-fluorouridine-3'-phosphate
  modified_base 18: mod_base = OTHER; note = 2'-fluorocytidine-3'-phosphate
  modified_base 19: mod_base = OTHER; note = 2'-O-methyluridine-3'-phosphate
  modified_base 20: mod_base = OTHER; note = 2'-fluoroadenosine-3'-phosphate
  modified_base 21: mod_base = OTHER; note = 2'-O-methylguanosine-3'-phosphorothioate
  modified_base 22: mod_base = OTHER; note = 2'-fluoroadenosine-3'-phosphorothioate
  modified_base 23: mod_base = OTHER; note = 2'-O-methyladenosine-3'-phosphate
acaaaagcaaaacaggtctagaa

SEQ ID NO: 501 - RNA, 21 nt, synthetic construct
  source 1..21: mol_type = other RNA; note = Description of Artificial Sequence: Synthetic oligonucleotide
  modified_base 1: mod_base = OTHER; note = 2'-fluorocytidine-3'-phosphate
  modified_base 2: mod_base = OTHER; note = 2'-O-methyluridine-3'-phosphate
  modified_base 3: mod_base = OTHER; note = 2'-fluoroadenosine-3'-phosphate
  modified_base 4: mod_base = OTHER; note = 2'-fluoroguanosine-3'-phosphate
  modified_base 5: mod_base = OTHER; note = 2'-fluoroadenosine-3'-phosphate
  modified_base 6: mod_base = OTHER; note = 2'-fluorocytidine-3'-phosphate
  modified_base 7: mod_base = OTHER; note = 2'-fluorocytidine-3'-phosphate
  modified_base 8: mod_base = OTHER; note = 2'-O-methyluridine-3'-phosphate
  modified_base 9: mod_base = OTHER; note = 2'-fluoroguanosine-3'-phosphate
  modified_base 10: mod_base = OTHER; note = 2'-fluorouridine-3'-phosphate
  modified_base 11: mod_base = OTHER; note = 2'-fluorouridine-3'-phosphate
  modified_base 12: mod_base = OTHER; note = 2'-O-methyluridine-3'-phosphate
  modified_base 13: mod_base = OTHER; note = 2'-fluorouridine-3'-phosphate
  modified_base 14: mod_base = OTHER; note = 2'-fluoroguanosine-3'-phosphate
  modified_base 15: mod_base = OTHER; note = 2'-fluorocytidine-3'-phosphate
  modified_base 16: mod_base = OTHER; note = 2'-O-methyluridine-3'-phosphate
  modified_base 17: mod_base = OTHER; note = 2'-fluorouridine-3'-phosphate
  modified_base 18: mod_base = OTHER; note = 2'-fluorouridine-3'-phosphate
  modified_base 19: mod_base = OTHER; note = 2'-fluorouridine-3'-phosphate
  modified_base 20: mod_base = OTHER; note = 2'-fluoroguanosine-3'-phosphate
  modified_base 21: mod_base = OTHER; note = 2'-fluorouridine-3'-phosphate N-[tris(GalNAc-alkyl)-amidodecanoyl)]-4-hydroxyprolinol Hyp-(GalNAc-alkyl)3
ctagacctgttttgcttttgt

SEQ ID NO: 502 - RNA, 23 nt, synthetic construct
  source 1..23: mol_type = other RNA; note = Description of Artificial Sequence: Synthetic oligonucleotide
  modified_base 1: mod_base = OTHER; note = 2'-O-methyladenosine-3'-phosphate
  modified_base 2: mod_base = OTHER; note = 2'-fluorocytidine-3'-phosphate
  modified_base 3: mod_base = OTHER; note = 2'-O-methyladenosine-3'-phosphate
  modified_base 4: mod_base = OTHER; note = 2'-fluoroadenosine-3'-phosphate
  modified_base 5: mod_base = OTHER; note = 2'-fluoroadenosine-3'-phosphate
  modified_base 6: mod_base = OTHER; note = 2'-fluoroadenosine-3'-phosphate
  modified_base 7: mod_base = OTHER; note = 2'-O-methylguanosine-3'-phosphate
  modified_base 8: mod_base = OTHER; note = 2'-fluorocytidine-3'-phosphate
  modified_base 9: mod_base = OTHER; note = 2'-O-methyladenosine-3'-phosphate
  modified_base 10: mod_base = OTHER; note = 2'-fluoroadenosine-3'-phosphate
  modified_base 11: mod_base = OTHER; note = 2'-O-methyladenosine-3'-phosphate
  modified_base 12: mod_base = OTHER; note = 2'-O-methyladenosine-3'-phosphate
  modified_base 13: mod_base = OTHER; note = 2'-O-methylcytidine-3'-phosphate
  modified_base 14: mod_base = OTHER; note = 2'-fluoroadenosine-3'-phosphate
  modified_base 15: mod_base = OTHER; note = 2'-O-methylguanosine-3'-phosphate
  modified_base 16: mod_base = OTHER; note = 2'-fluoroguanosine-3'-phosphate
  modified_base 17: mod_base = OTHER; note = 2'-fluorouridine-3'-phosphate
  modified_base 18: mod_base = OTHER; note = 2'-fluorocytidine-3'-phosphate
  modified_base 19: mod_base = OTHER; note = 2'-O-methyluridine-3'-phosphate
  modified_base 20: mod_base = OTHER; note = 2'-fluoroadenosine-3'-phosphate
  modified_base 21: mod_base = OTHER; note = 2'-O-methylguanosine-3'-phosphorothioate
  modified_base 22: mod_base = OTHER; note = 2'-fluoroadenosine-3'-phosphorothioate
  modified_base 23: mod_base = OTHER; note = 2'-O-methyladenosine-3'-phosphate
acaaaagcaaaacaggtctagaa

SEQ ID NO: 503 - RNA, 21 nt, synthetic construct
  source 1..21: mol_type = other RNA; note = Description of Artificial Sequence: Synthetic oligonucleotide
  modified_base 1: mod_base = OTHER; note = 2'-fluorocytidine-3'-phosphate
  modified_base 2: mod_base = OTHER; note = 2'-fluorouridine-3'-phosphate
  modified_base 3: mod_base = OTHER; note = 2'-fluoroadenosine-3'-phosphate
  modified_base 4: mod_base = OTHER; note = 2'-fluoroguanosine-3'-phosphate
  modified_base 5: mod_base = OTHER; note = 2'-fluoroadenosine-3'-phosphate
  modified_base 6: mod_base = OTHER; note = 2'-fluorocytidine-3'-phosphate
  modified_base 7: mod_base = OTHER; note = 2'-fluorocytidine-3'-phosphate
  modified_base 8: mod_base = OTHER; note = 2'-O-methyluridine-3'-phosphate
  modified_base 9: mod_base = OTHER; note = 2'-fluoroguanosine-3'-phosphate
  modified_base 10: mod_base = OTHER; note = 2'-fluorouridine-3'-phosphate
  modified_base 11: mod_base = OTHER; note = 2'-fluorouridine-3'-phosphate
  modified_base 12: mod_base = OTHER; note = 2'-O-methyluridine-3'-phosphate
  modified_base 13: mod_base = OTHER; note = 2'-fluorouridine-3'-phosphate
  modified_base 14: mod_base = OTHER; note = 2'-fluoroguanosine-3'-phosphate
  modified_base 15: mod_base = OTHER; note = 2'-fluorocytidine-3'-phosphate
  modified_base 16: mod_base = OTHER; note = 2'-fluorouridine-3'-phosphate
  modified_base 17: mod_base = OTHER; note = 2'-fluorouridine-3'-phosphate
  modified_base 18: mod_base = OTHER; note = 2'-fluorouridine-3'-phosphate
  modified_base 19: mod_base = OTHER; note = 2'-fluorouridine-3'-phosphate
  modified_base 20: mod_base = OTHER; note = 2'-fluoroguanosine-3'-phosphate
  modified_base 21: mod_base = OTHER; note = 2'-fluorouridine-3'-phosphate N-[tris(GalNAc-alkyl)-amidodecanoyl)]-4-hydroxyprolinol Hyp-(GalNAc-alkyl)3
ctagacctgttttgcttttgt

SEQ ID NO: 504 - RNA, 23 nt, synthetic construct
  source 1..23: mol_type = other RNA; note = Description of Artificial Sequence: Synthetic oligonucleotide
  modified_base 1: mod_base = OTHER; note = 2'-O-methyladenosine-3'-phosphate
  modified_base 2: mod_base = OTHER; note = 2'-fluorocytidine-3'-phosphate
  modified_base 3: mod_base = OTHER; note = 2'-O-methyladenosine-3'-phosphate
  modified_base 4: mod_base = OTHER; note = 2'-fluoroadenosine-3'-phosphate
  modified_base 5: mod_base = OTHER; note = 2'-fluoroadenosine-3'-phosphate
  modified_base 6: mod_base = OTHER; note = 2'-fluoroadenosine-3'-phosphate
  modified_base 7: mod_base = OTHER; note = 2'-O-methylguanosine-3'-phosphate
  modified_base 8: mod_base = OTHER; note = 2'-fluorocytidine-3'-phosphate
  modified_base 9: mod_base = OTHER; note = 2'-O-methyladenosine-3'-phosphate
  modified_base 10: mod_base = OTHER; note = 2'-fluoroadenosine-3'-phosphate
  modified_base 11: mod_base = OTHER; note = 2'-O-methyladenosine-3'-phosphate
  modified_base 12: mod_base = OTHER; note = 2'-O-methyladenosine-3'-phosphate
  modified_base 13: mod_base = OTHER; note = 2'-O-methylcytidine-3'-phosphate
  modified_base 14: mod_base = OTHER; note = 2'-fluoroadenosine-3'-phosphate
  modified_base 15: mod_base = OTHER; note = 2'-O-methylguanosine-3'-phosphate
  modified_base 16: mod_base = OTHER; note = 2'-fluoroguanosine-3'-phosphate
  modified_base 17: mod_base = OTHER; note = 2'-fluorouridine-3'-phosphate
  modified_base 18: mod_base = OTHER; note = 2'-fluorocytidine-3'-phosphate
  modified_base 19: mod_base = OTHER; note = 2'-O-methyluridine-3'-phosphate
  modified_base 20: mod_base = OTHER; note = 2'-fluoroadenosine-3'-phosphate
  modified_base 21: mod_base = OTHER; note = 2'-O-methylguanosine-3'-phosphorothioate
  modified_base 22: mod_base = OTHER; note = 2'-fluoroadenosine-3'-phosphorothioate
  modified_base 23: mod_base = OTHER; note = 2'-O-methyladenosine-3'-phosphate
acaaaagcaaaacaggtctagaa

SEQ ID NO: 505 - RNA, 21 nt, synthetic construct
  source 1..21: mol_type = other RNA; note = Description of Artificial Sequence: Synthetic oligonucleotide
  modified_base 1: mod_base = OTHER; note = 2'-fluorocytidine-3'-phosphate
  modified_base 2: mod_base = OTHER; note = 2'-fluorouridine-3'-phosphate
  modified_base 3: mod_base = OTHER; note = 2'-fluoroadenosine-3'-phosphate
  modified_base 4: mod_base = OTHER; note = 2'-fluoroguanosine-3'-phosphate
  modified_base 5: mod_base = OTHER; note = 2'-fluoroadenosine-3'-phosphate
  modified_base 6: mod_base = OTHER; note = 2'-fluorocytidine-3'-phosphate
  modified_base 7: mod_base = OTHER; note = 2'-fluorocytidine-3'-phosphate
  modified_base 8: mod_base = OTHER; note = 2'-fluorouridine-3'-phosphate
  modified_base 9: mod_base = OTHER; note = 2'-fluoroguanosine-3'-phosphate
  modified_base 10: mod_base = OTHER; note = 2'-fluorouridine-3'-phosphate
  modified_base 11: mod_base = OTHER; note = 2'-fluorouridine-3'-phosphate
  modified_base 12: mod_base = OTHER; note = 2'-fluorouridine-3'-phosphate
  modified_base 13: mod_base = OTHER; note = 2'-fluorouridine-3'-phosphate
  modified_base 14: mod_base = OTHER; note = 2'-fluoroguanosine-3'-phosphate
  modified_base 15: mod_base = OTHER; note = 2'-fluorocytidine-3'-phosphate
  modified_base 16: mod_base = OTHER; note = 2'-fluorouridine-3'-phosphate
  modified_base 17: mod_base = OTHER; note = 2'-fluorouridine-3'-phosphate
  modified_base 18: mod_base = OTHER; note = 2'-fluorouridine-3'-phosphate
  modified_base 19: mod_base = OTHER; note = 2'-fluorouridine-3'-phosphate
  modified_base 20: mod_base = OTHER; note = 2'-fluoroguanosine-3'-phosphate
  modified_base 21: mod_base = OTHER; note = 2'-fluorouridine-3'-phosphate N-[tris(GalNAc-alkyl)-amidodecanoyl)]-4-hydroxyprolinol Hyp-(GalNAc-alkyl)3
ctagacctgttttgcttttgt

SEQ ID NO: 506 - RNA, 23 nt, synthetic construct
  source 1..23: mol_type = other RNA; note = Description of Artificial Sequence: Synthetic oligonucleotide
  modified_base 1: mod_base = OTHER; note = 2'-O-methyladenosine-3'-phosphate
  modified_base 2: mod_base = OTHER; note = 2'-fluorocytidine-3'-phosphate
  modified_base 3: mod_base = OTHER; note = 2'-O-methyladenosine-3'-phosphate
  modified_base 4: mod_base = OTHER; note = 2'-fluoroadenosine-3'-phosphate
  modified_base 5: mod_base = OTHER; note = 2'-fluoroadenosine-3'-phosphate
  modified_base 6: mod_base = OTHER; note = 2'-fluoroadenosine-3'-phosphate
  modified_base 7: mod_base = OTHER; note = 2'-O-methylguanosine-3'-phosphate
  modified_base 8: mod_base = OTHER; note = 2'-fluorocytidine-3'-phosphate
  modified_base 9: mod_base = OTHER; note = 2'-O-methyladenosine-3'-phosphate
  modified_base 10: mod_base = OTHER; note = 2'-fluoroadenosine-3'-phosphate
  modified_base 11: mod_base = OTHER; note = 2'-O-methyladenosine-3'-phosphate
  modified_base 12: mod_base = OTHER; note = 2'-O-methyladenosine-3'-phosphate
  modified_base 13: mod_base = OTHER; note = 2'-O-methylcytidine-3'-phosphate
  modified_base 14: mod_base = OTHER; note = 2'-fluoroadenosine-3'-phosphate
  modified_base 15: mod_base = OTHER; note = 2'-O-methylguanosine-3'-phosphate
  modified_base 16: mod_base = OTHER; note = 2'-fluoroguanosine-3'-phosphate
  modified_base 17: mod_base = OTHER; note = 2'-fluorouridine-3'-phosphate
  modified_base 18: mod_base = OTHER; note = 2'-fluorocytidine-3'-phosphate
  modified_base 19: mod_base = OTHER; note = 2'-O-methyluridine-3'-phosphate
  modified_base 20: mod_base = OTHER; note = 2'-fluoroadenosine-3'-phosphate
  modified_base 21: mod_base = OTHER; note = 2'-O-methylguanosine-3'-phosphorothioate
  modified_base 22: mod_base = OTHER; note = 2'-fluoroadenosine-3'-phosphorothioate
  modified_base 23: mod_base = OTHER; note = 2'-O-methyladenosine-3'-phosphate
acaaaagcaaaacaggtctagaa

SEQ ID NO: 507 - RNA, 21 nt, synthetic construct
  source 1..21: mol_type = other RNA; note = Description of Artificial Sequence: Synthetic oligonucleotide
  modified_base 1: mod_base = OTHER; note = 2'-fluorocytidine-3'-phosphate
  modified_base 2: mod_base = OTHER; note = 2'-O-methyluridine-3'-phosphate
  modified_base 3: mod_base = OTHER; note = 2'-fluoroadenosine-3'-phosphate
  modified_base 4: mod_base = OTHER; note = 2'-O-methylguanosine-3'-phosphate
  modified_base 5: mod_base = OTHER; note = 2'-fluoroadenosine-3'-phosphate
  modified_base 6: mod_base = OTHER; note = 2'-O-methylcytidine-3'-phosphate
  modified_base 7: mod_base = OTHER; note = 2'-fluorocytidine-3'-phosphate
  modified_base 8: mod_base = OTHER; note = 2'-O-methyluridine-3'-phosphate
  modified_base 9: mod_base = OTHER; note = 2'-fluoroguanosine-3'-phosphate
  modified_base 10: mod_base = OTHER; note = 2'-fluorouridine-3'-phosphate
  modified_base 11: mod_base = OTHER; note = 2'-fluorouridine-3'-phosphate
  modified_base 12: mod_base = OTHER; note = 2'-O-methyluridine-3'-phosphate
  modified_base 13: mod_base = OTHER; note = 2'-fluorouridine-3'-phosphate
  modified_base 14: mod_base = OTHER; note = 2'-O-methylguanosine-3'-phosphate
  modified_base 15: mod_base = OTHER; note = 2'-fluorocytidine-3'-phosphate
  modified_base 16: mod_base = OTHER; note = 2'-O-methyluridine-3'-phosphate
  modified_base 17: mod_base = OTHER; note = 2'-fluorouridine-3'-phosphate
  modified_base 18: mod_base = OTHER; note = 2'-O-methyluridine-3'-phosphate
  modified_base 19: mod_base = OTHER; note = 2'-fluorouridine-3'-phosphate
  modified_base 20: mod_base = OTHER; note = 2'-O-methylguanosine-3'-phosphate
  modified_base 21: mod_base = OTHER; note = 2'-fluorouridine-3'-phosphate N-[tris(GalNAc-alkyl)-amidodecanoyl)]-4-hydroxyprolinol Hyp-(GalNAc-alkyl)3
ctagacctgttttgcttttgt

SEQ ID NO: 508 - RNA, 23 nt, synthetic construct
  source 1..23: mol_type = other RNA; note = Description of Artificial Sequence: Synthetic oligonucleotide
  modified_base 1: mod_base = OTHER; note = 2'-O-methyladenosine-3'-phosphate
  modified_base 2: mod_base = OTHER; note = 2'-fluorocytidine-3'-phosphate
  modified_base 3: mod_base = OTHER; note = 2'-O-methyladenosine-3'-phosphate
  modified_base 4: mod_base = OTHER; note = 2'-fluoroadenosine-3'-phosphate
  modified_base 5: mod_base = OTHER; note = 2'-fluoroadenosine-3'-phosphate
  modified_base 6: mod_base = OTHER; note = 2'-fluoroadenosine-3'-phosphate
  modified_base 7: mod_base = OTHER; note = 2'-fluoroguanosine-3'-phosphate
  modified_base 8: mod_base = OTHER; note = 2'-fluorocytidine-3'-phosphate
  modified_base 9: mod_base = OTHER; note = 2'-O-methyladenosine-3'-phosphate
  modified_base 10: mod_base = OTHER; note = 2'-fluoroadenosine-3'-phosphate
  modified_base 11: mod_base = OTHER; note = 2'-O-methyladenosine-3'-phosphate
  modified_base 12: mod_base = OTHER; note = 2'-O-methyladenosine-3'-phosphate
  modified_base 13: mod_base = OTHER; note = 2'-O-methylcytidine-3'-phosphate
  modified_base 14: mod_base = OTHER; note = 2'-fluoroadenosine-3'-phosphate
  modified_base 15: mod_base = OTHER; note = 2'-O-methylguanosine-3'-phosphate
  modified_base 16: mod_base = OTHER; note = 2'-fluoroguanosine-3'-phosphate
  modified_base 17: mod_base = OTHER; note = 2'-fluorouridine-3'-phosphate
  modified_base 18: mod_base = OTHER; note = 2'-fluorocytidine-3'-phosphate
  modified_base 19: mod_base = OTHER; note = 2'-O-methyluridine-3'-phosphate
  modified_base 20: mod_base = OTHER; note = 2'-fluoroadenosine-3'-phosphate
  modified_base 21: mod_base = OTHER; note = 2'-O-methylguanosine-3'-phosphorothioate
  modified_base 22: mod_base = OTHER; note = 2'-fluoroadenosine-3'-phosphorothioate
  modified_base 23: mod_base = OTHER; note = 2'-O-methyladenosine-3'-phosphate
acaaaagcaaaacaggtctagaa

SEQ ID NO: 509 - RNA, 21 nt, synthetic construct
  source 1..21: mol_type = other RNA; note = Description of Artificial Sequence: Synthetic oligonucleotide
  modified_base 1: mod_base = OTHER; note = 2'-fluorocytidine-3'-phosphate
  modified_base 2: mod_base = OTHER; note = 2'-O-methyluridine-3'-phosphate
  modified_base 3: mod_base = OTHER; note = 2'-fluoroadenosine-3'-phosphate
  modified_base 4: mod_base = OTHER; note = 2'-fluoroguanosine-3'-phosphate
  modified_base 5: mod_base = OTHER; note = 2'-fluoroadenosine-3'-phosphate
  modified_base 6: mod_base = OTHER; note = 2'-O-methylcytidine-3'-phosphate
  modified_base 7: mod_base = OTHER; note = 2'-fluorocytidine-3'-phosphate
  modified_base 8: mod_base = OTHER; note = 2'-O-methyluridine-3'-phosphate
  modified_base 9: mod_base = OTHER; note = 2'-fluoroguanosine-3'-phosphate
  modified_base 10: mod_base = OTHER; note = 2'-fluorouridine-3'-phosphate
  modified_base 11: mod_base = OTHER; note = 2'-fluorouridine-3'-phosphate
  modified_base 12: mod_base = OTHER; note = 2'-O-methyluridine-3'-phosphate
  modified_base 13: mod_base = OTHER; note = 2'-fluorouridine-3'-phosphate
  modified_base 14: mod_base = OTHER; note = 2'-O-methylguanosine-3'-phosphate
  modified_base 15: mod_base = OTHER; note = 2'-fluorocytidine-3'-phosphate
  modified_base 16: mod_base = OTHER; note = 2'-O-methyluridine-3'-phosphate
  modified_base 17: mod_base = OTHER; note = 2'-fluorouridine-3'-phosphate
  modified_base 18: mod_base = OTHER; note = 2'-O-methyluridine-3'-phosphate
  modified_base 19: mod_base = OTHER; note = 2'-fluorouridine-3'-phosphate
  modified_base 20: mod_base = OTHER; note = 2'-O-methylguanosine-3'-phosphate
  modified_base 21: mod_base = OTHER; note = 2'-fluorouridine-3'-phosphate N-[tris(GalNAc-alkyl)-amidodecanoyl)]-4-hydroxyprolinol Hyp-(GalNAc-alkyl)3
ctagacctgttttgcttttgt

SEQ ID NO: 510 - RNA, 23 nt, synthetic construct
  source 1..23: mol_type = other RNA; note = Description of Artificial Sequence: Synthetic oligonucleotide
  modified_base 1: mod_base = OTHER; note = 2'-O-methyladenosine-3'-phosphate
  modified_base 2: mod_base = OTHER; note = 2'-fluorocytidine-3'-phosphate
  modified_base 3: mod_base = OTHER; note = 2'-O-methyladenosine-3'-phosphate
  modified_base 4: mod_base = OTHER; note = 2'-fluoroadenosine-3'-phosphate
  modified_base 5: mod_base = OTHER; note = 2'-fluoroadenosine-3'-phosphate
  modified_base 6: mod_base = OTHER; note = 2'-fluoroadenosine-3'-phosphate
  modified_base 7: mod_base = OTHER; note = 2'-fluoroguanosine-3'-phosphate
  modified_base 8: mod_base = OTHER; note = 2'-fluorocytidine-3'-phosphate
  modified_base 9: mod_base = OTHER; note = 2'-O-methyladenosine-3'-phosphate
  modified_base 10: mod_base = OTHER; note = 2'-fluoroadenosine-3'-phosphate
  modified_base 11: mod_base = OTHER; note = 2'-O-methyladenosine-3'-phosphate
  modified_base 12: mod_base = OTHER; note = 2'-O-methyladenosine-3'-phosphate
  modified_base 13: mod_base = OTHER; note = 2'-O-methylcytidine-3'-phosphate
  modified_base 14: mod_base = OTHER; note = 2'-fluoroadenosine-3'-phosphate
  modified_base 15: mod_base = OTHER; note = 2'-O-methylguanosine-3'-phosphate
  modified_base 16: mod_base = OTHER; note = 2'-fluoroguanosine-3'-phosphate
  modified_base 17: mod_base = OTHER; note = 2'-fluorouridine-3'-phosphate
  modified_base 18: mod_base = OTHER; note = 2'-fluorocytidine-3'-phosphate
  modified_base 19: mod_base = OTHER; note = 2'-O-methyluridine-3'-phosphate
  modified_base 20: mod_base = OTHER; note = 2'-fluoroadenosine-3'-phosphate
  modified_base 21: mod_base = OTHER; note = 2'-O-methylguanosine-3'-phosphorothioate
  modified_base 22: mod_base = OTHER; note = 2'-fluoroadenosine-3'-phosphorothioate
  modified_base 23: mod_base = OTHER; note = 2'-O-methyladenosine-3'-phosphate
acaaaagcaaaacaggtctagaa

SEQ ID NO: 511 - RNA, 21 nt, synthetic construct
  source 1..21: mol_type = other RNA; note = Description of Artificial Sequence: Synthetic oligonucleotide
  modified_base 1: mod_base = OTHER; note = 2'-fluorocytidine-3'-phosphate
  modified_base 2: mod_base = OTHER; note = 2'-O-methyluridine-3'-phosphate
  modified_base 3: mod_base = OTHER; note = 2'-fluoroadenosine-3'-phosphate
  modified_base 4: mod_base = OTHER; note = 2'-fluoroguanosine-3'-phosphate
  modified_base 5: mod_base = OTHER; note = 2'-fluoroadenosine-3'-phosphate
  modified_base 6: mod_base = OTHER; note = 2'-O-methylcytidine-3'-phosphate
  modified_base 7: mod_base = OTHER; note = 2'-fluorocytidine-3'-phosphate
  modified_base 8: mod_base = OTHER; note = 2'-O-methyluridine-3'-phosphate
  modified_base 9: mod_base = OTHER; note = 2'-fluoroguanosine-3'-phosphate
  modified_base 10: mod_base = OTHER; note = 2'-fluorouridine-3'-phosphate
  modified_base 11: mod_base = OTHER; note = 2'-fluorouridine-3'-phosphate
  modified_base 12: mod_base = OTHER; note = 2'-O-methyluridine-3'-phosphate
  modified_base 13: mod_base = OTHER; note = 2'-fluorouridine-3'-phosphate
  modified_base 14: mod_base = OTHER; note = 2'-fluoroguanosine-3'-phosphate
  modified_base 15: mod_base = OTHER; note = 2'-fluorocytidine-3'-phosphate
  modified_base 16: mod_base = OTHER; note = 2'-O-methyluridine-3'-phosphate
  modified_base 17: mod_base = OTHER; note = 2'-fluorouridine-3'-phosphate
  modified_base 18: mod_base = OTHER; note = 2'-O-methyluridine-3'-phosphate
  modified_base 19: mod_base = OTHER; note = 2'-fluorouridine-3'-phosphate
  modified_base 20: mod_base = OTHER; note = 2'-O-methylguanosine-3'-phosphate
  modified_base 21: mod_base = OTHER; note = 2'-fluorouridine-3'-phosphate N-[tris(GalNAc-alkyl)-amidodecanoyl)]-4-hydroxyprolinol Hyp-(GalNAc-alkyl)3
ctagacctgttttgcttttgt

SEQ ID NO: 512 - RNA, 23 nt, synthetic construct
  source 1..23: mol_type = other RNA; note = Description of Artificial Sequence: Synthetic oligonucleotide
  modified_base 1: mod_base = OTHER; note = 2'-O-methyladenosine-3'-phosphate
  modified_base 2: mod_base = OTHER; note = 2'-fluorocytidine-3'-phosphate
  modified_base 3: mod_base = OTHER; note = 2'-O-methyladenosine-3'-phosphate
  modified_base 4: mod_base = OTHER; note = 2'-fluoroadenosine-3'-phosphate
  modified_base 5: mod_base = OTHER; note = 2'-fluoroadenosine-3'-phosphate
  modified_base 6: mod_base = OTHER; note = 2'-fluoroadenosine-3'-phosphate
  modified_base 7: mod_base = OTHER; note = 2'-fluoroguanosine-3'-phosphate
  modified_base 8: mod_base = OTHER; note = 2'-fluorocytidine-3'-phosphate
  modified_base 9: mod_base = OTHER; note = 2'-O-methyladenosine-3'-phosphate
  modified_base 10: mod_base = OTHER; note = 2'-fluoroadenosine-3'-phosphate
  modified_base 11: mod_base = OTHER; note = 2'-O-methyladenosine-3'-phosphate
  modified_base 12: mod_base = OTHER; note = 2'-O-methyladenosine-3'-phosphate
  modified_base 13: mod_base = OTHER; note = 2'-O-methylcytidine-3'-phosphate
  modified_base 14: mod_base = OTHER; note = 2'-fluoroadenosine-3'-phosphate
  modified_base 15: mod_base = OTHER; note = 2'-O-methylguanosine-3'-phosphate
  modified_base 16: mod_base = OTHER; note = 2'-fluoroguanosine-3'-phosphate
  modified_base 17: mod_base = OTHER; note = 2'-fluorouridine-3'-phosphate
  modified_base 18: mod_base = OTHER; note = 2'-fluorocytidine-3'-phosphate
  modified_base 19: mod_base = OTHER; note = 2'-O-methyluridine-3'-phosphate
  modified_base 20: mod_base = OTHER; note = 2'-fluoroadenosine-3'-phosphate
  modified_base 21: mod_base = OTHER; note = 2'-O-methylguanosine-3'-phosphorothioate
  modified_base 22: mod_base = OTHER; note = 2'-fluoroadenosine-3'-phosphorothioate
  modified_base 23: mod_base = OTHER; note = 2'-O-methyladenosine-3'-phosphate
acaaaagcaaaacaggtctagaa

SEQ ID NO: 513 - RNA, 21 nt, synthetic construct
  source 1..21: mol_type = other RNA; note = Description of Artificial Sequence: Synthetic oligonucleotide
  modified_base 1: mod_base = OTHER; note = 2'-fluorocytidine-3'-phosphate
  modified_base 2: mod_base = OTHER; note = 2'-O-methyluridine-3'-phosphate
  modified_base 3: mod_base = OTHER; note = 2'-fluoroadenosine-3'-phosphate
  modified_base 4: mod_base = OTHER; note = 2'-fluoroguanosine-3'-phosphate
  modified_base 5: mod_base = OTHER; note = 2'-fluoroadenosine-3'-phosphate
  modified_base 6: mod_base = OTHER; note = 2'-O-methylcytidine-3'-phosphate
  modified_base 7: mod_base = OTHER; note = 2'-fluorocytidine-3'-phosphate
  modified_base 8: mod_base = OTHER; note = 2'-O-methyluridine-3'-phosphate
  modified_base 9: mod_base = OTHER; note = 2'-fluoroguanosine-3'-phosphate
  modified_base 10: mod_base = OTHER; note = 2'-fluorouridine-3'-phosphate
  modified_base 11: mod_base = OTHER; note = 2'-fluorouridine-3'-phosphate
  modified_base 12: mod_base = OTHER; note = 2'-O-methyluridine-3'-phosphate
  modified_base 13: mod_base = OTHER; note = 2'-fluorouridine-3'-phosphate
  modified_base 14: mod_base = OTHER; note = 2'-fluoroguanosine-3'-phosphate
  modified_base 15: mod_base = OTHER; note = 2'-fluorocytidine-3'-phosphate
  modified_base 16: mod_base = OTHER; note = 2'-O-methyluridine-3'-phosphate
  modified_base 17: mod_base = OTHER; note = 2'-fluorouridine-3'-phosphate
  modified_base 18: mod_base = OTHER; note = 2'-fluorouridine-3'-phosphate
  modified_base 19: mod_base = OTHER; note = 2'-fluorouridine-3'-phosphate
  modified_base 20: mod_base = OTHER; note = 2'-O-methylguanosine-3'-phosphate
  modified_base 21: mod_base = OTHER; note = 2'-fluorouridine-3'-phosphate N-[tris(GalNAc-alkyl)-amidodecanoyl)]-4-hydroxyprolinol Hyp-(GalNAc-alkyl)3
ctagacctgttttgcttttgt

SEQ ID NO: 514 - RNA, 23 nt, synthetic construct
  source 1..23: mol_type = other RNA; note = Description of Artificial Sequence: Synthetic oligonucleotide
  modified_base 1: mod_base = OTHER; note = 2'-O-methyladenosine-3'-phosphate
  modified_base 2: mod_base = OTHER; note = 2'-fluorocytidine-3'-phosphate
  modified_base 3: mod_base = OTHER; note = 2'-O-methyladenosine-3'-phosphate
  modified_base 4: mod_base = OTHER; note = 2'-fluoroadenosine-3'-phosphate
  modified_base 5: mod_base = OTHER; note = 2'-fluoroadenosine-3'-phosphate
  modified_base 6: mod_base = OTHER; note = 2'-fluoroadenosine-3'-phosphate
  modified_base 7: mod_base = OTHER; note = 2'-fluoroguanosine-3'-phosphate
  modified_base 8: mod_base = OTHER; note = 2'-fluorocytidine-3'-phosphate
  modified_base 9: mod_base = OTHER; note = 2'-O-methyladenosine-3'-phosphate
  modified_base 10: mod_base = OTHER; note = 2'-fluoroadenosine-3'-phosphate
  modified_base 11: mod_base = OTHER; note = 2'-O-methyladenosine-3'-phosphate
  modified_base 12: mod_base = OTHER; note = 2'-O-methyladenosine-3'-phosphate
  modified_base 13: mod_base = OTHER; note = 2'-O-methylcytidine-3'-phosphate
  modified_base 14: mod_base = OTHER; note = 2'-fluoroadenosine-3'-phosphate
  modified_base 15: mod_base = OTHER; note = 2'-O-methylguanosine-3'-phosphate
  modified_base 16: mod_base = OTHER; note = 2'-fluoroguanosine-3'-phosphate
  modified_base 17: mod_base = OTHER; note = 2'-fluorouridine-3'-phosphate
  modified_base 18: mod_base = OTHER; note = 2'-fluorocytidine-3'-phosphate
  modified_base 19: mod_base = OTHER; note = 2'-O-methyluridine-3'-phosphate
  modified_base 20: mod_base = OTHER; note = 2'-fluoroadenosine-3'-phosphate
  modified_base 21: mod_base = OTHER; note = 2'-O-methylguanosine-3'-phosphorothioate
  modified_base 22: mod_base = OTHER; note = 2'-fluoroadenosine-3'-phosphorothioate
  modified_base 23: mod_base = OTHER; note = 2'-O-methyladenosine-3'-phosphate
acaaaagcaaaacaggtctagaa

SEQ ID NO: 515 - RNA, 21 nt, synthetic construct
  source 1..21: mol_type = other RNA; note = Description of Artificial Sequence: Synthetic oligonucleotide
  modified_base 1: mod_base = OTHER; note = 2'-fluorocytidine-3'-phosphate
  modified_base 2: mod_base = OTHER; note = 2'-O-methyluridine-3'-phosphate
  modified_base 3: mod_base = OTHER; note = 2'-fluoroadenosine-3'-phosphate
  modified_base 4: mod_base = OTHER; note = 2'-fluoroguanosine-3'-phosphate
  modified_base 5: mod_base = OTHER; note = 2'-fluoroadenosine-3'-phosphate
  modified_base 6: mod_base = OTHER; note = 2'-fluorocytidine-3'-phosphate
  modified_base 7: mod_base = OTHER; note = 2'-fluorocytidine-3'-phosphate
  modified_base 8: mod_base = OTHER; note = 2'-O-methyluridine-3'-phosphate
  modified_base 9: mod_base = OTHER; note = 2'-fluoroguanosine-3'-phosphate
  modified_base 10: mod_base = OTHER; note = 2'-fluorouridine-3'-phosphate
  modified_base 11: mod_base = OTHER; note = 2'-fluorouridine-3'-phosphate
  modified_base 12: mod_base = OTHER; note = 2'-O-methyluridine-3'-phosphate
  modified_base 13: mod_base = OTHER; note = 2'-fluorouridine-3'-phosphate
  modified_base 14: mod_base = OTHER; note = 2'-fluoroguanosine-3'-phosphate
  modified_base 15: mod_base = OTHER; note = 2'-fluorocytidine-3'-phosphate
  modified_base 16: mod_base = OTHER; note = 2'-O-methyluridine-3'-phosphate
  modified_base 17: mod_base = OTHER; note = 2'-fluorouridine-3'-phosphate
  modified_base 18: mod_base = OTHER; note = 2'-fluorouridine-3'-phosphate
  modified_base 19: mod_base = OTHER; note = 2'-fluorouridine-3'-phosphate
  modified_base 20: mod_base = OTHER; note = 2'-fluoroguanosine-3'-phosphate
  modified_base 21: mod_base = OTHER; note = 2'-fluorouridine-3'-phosphate N-[tris(GalNAc-alkyl)-amidodecanoyl)]-4-hydroxyprolinol Hyp-(GalNAc-alkyl)3
ctagacctgttttgcttttgt

SEQ ID NO: 516 - RNA, 23 nt, synthetic construct
  source 1..23: mol_type = other RNA; note = Description of Artificial Sequence: Synthetic oligonucleotide
  modified_base 1: mod_base = OTHER; note = 2'-O-methyladenosine-3'-phosphate
  modified_base 2: mod_base = OTHER; note = 2'-fluorocytidine-3'-phosphate
  modified_base 3: mod_base = OTHER; note = 2'-O-methyladenosine-3'-phosphate
  modified_base 4: mod_base = OTHER; note = 2'-fluoroadenosine-3'-phosphate
  modified_base 5: mod_base = OTHER; note = 2'-fluoroadenosine-3'-phosphate
  modified_base 6: mod_base = OTHER; note = 2'-fluoroadenosine-3'-phosphate
  modified_base 7: mod_base = OTHER; note = 2'-fluoroguanosine-3'-phosphate
  modified_base 8: mod_base = OTHER; note = 2'-fluorocytidine-3'-phosphate
  modified_base 9: mod_base = OTHER; note = 2'-O-methyladenosine-3'-phosphate
  modified_base 10: mod_base = OTHER; note = 2'-fluoroadenosine-3'-phosphate
  modified_base 11: mod_base = OTHER; note = 2'-O-methyladenosine-3'-phosphate
  modified_base 12: mod_base = OTHER; note = 2'-O-methyladenosine-3'-phosphate
  modified_base 13: mod_base = OTHER; note = 2'-O-methylcytidine-3'-phosphate
  modified_base 14: mod_base = OTHER; note = 2'-fluoroadenosine-3'-phosphate
  modified_base 15: mod_base = OTHER; note = 2'-O-methylguanosine-3'-phosphate
  modified_base 16: mod_base = OTHER; note = 2'-fluoroguanosine-3'-phosphate
  modified_base 17: mod_base = OTHER; note = 2'-fluorouridine-3'-phosphate
  modified_base 18: mod_base = OTHER; note = 2'-fluorocytidine-3'-phosphate
  modified_base 19: mod_base = OTHER; note = 2'-O-methyluridine-3'-phosphate
  modified_base 20: mod_base = OTHER; note = 2'-fluoroadenosine-3'-phosphate
  modified_base 21: mod_base = OTHER; note = 2'-O-methylguanosine-3'-phosphorothioate
  modified_base 22: mod_base = OTHER; note = 2'-fluoroadenosine-3'-phosphorothioate
  modified_base 23: mod_base = OTHER; note = 2'-O-methyladenosine-3'-phosphate
acaaaagcaaaacaggtctagaa

SEQ ID NO: 517 - RNA, 21 nt, synthetic construct
  source 1..21: mol_type = other RNA; note = Description of Artificial Sequence: Synthetic oligonucleotide
  modified_base 1: mod_base = OTHER; note = 2'-fluorocytidine-3'-phosphate
  modified_base 2: mod_base = OTHER; note = 2'-fluorouridine-3'-phosphate
  modified_base 3: mod_base = OTHER; note = 2'-fluoroadenosine-3'-phosphate
  modified_base 4: mod_base = OTHER; note = 2'-fluoroguanosine-3'-phosphate
  modified_base 5: mod_base = OTHER; note = 2'-fluoroadenosine-3'-phosphate
  modified_base 6: mod_base = OTHER; note = 2'-fluorocytidine-3'-phosphate
  modified_base 7: mod_base = OTHER; note = 2'-fluorocytidine-3'-phosphate
  modified_base 8: mod_base = OTHER; note = 2'-O-methyluridine-3'-phosphate
  modified_base 9: mod_base = OTHER; note = 2'-fluoroguanosine-3'-phosphate
  modified_base 10: mod_base = OTHER; note = 2'-fluorouridine-3'-phosphate
  modified_base 11: mod_base = OTHER; note = 2'-fluorouridine-3'-phosphate
  modified_base 12: mod_base = OTHER; note = 2'-O-methyluridine-3'-phosphate
  modified_base 13: mod_base = OTHER; note = 2'-fluorouridine-3'-phosphate
  modified_base 14: mod_base = OTHER; note = 2'-fluoroguanosine-3'-phosphate
  modified_base 15: mod_base = OTHER; note = 2'-fluorocytidine-3'-phosphate
  modified_base 16: mod_base = OTHER; note = 2'-fluorouridine-3'-phosphate
  modified_base 17: mod_base = OTHER; note = 2'-fluorouridine-3'-phosphate
  modified_base 18: mod_base = OTHER; note = 2'-fluorouridine-3'-phosphate
  modified_base 19: mod_base = OTHER; note = 2'-fluorouridine-3'-phosphate
  modified_base 20: mod_base = OTHER; note = 2'-fluoroguanosine-3'-phosphate
  modified_base 21: mod_base = OTHER; note = 2'-fluorouridine-3'-phosphate N-[tris(GalNAc-alkyl)-amidodecanoyl)]-4-hydroxyprolinol Hyp-(GalNAc-alkyl)3
ctagacctgttttgcttttgt

SEQ ID NO: 518 - RNA, 23 nt, synthetic construct
  source 1..23: mol_type = other RNA; note = Description of Artificial Sequence: Synthetic oligonucleotide
  modified_base 1: mod_base = OTHER; note = 2'-O-methyladenosine-3'-phosphate
  modified_base 2: mod_base = OTHER; note = 2'-fluorocytidine-3'-phosphate
  modified_base 3: mod_base = OTHER; note = 2'-O-methyladenosine-3'-phosphate
  modified_base 4: mod_base = OTHER; note = 2'-fluoroadenosine-3'-phosphate
  modified_base 5: mod_base = OTHER; note = 2'-fluoroadenosine-3'-phosphate
  modified_base 6: mod_base = OTHER; note = 2'-fluoroadenosine-3'-phosphate
  modified_base 7: mod_base = OTHER; note = 2'-fluoroguanosine-3'-phosphate
  modified_base 8: mod_base = OTHER; note = 2'-fluorocytidine-3'-phosphate
  modified_base 9: mod_base = OTHER; note = 2'-O-methyladenosine-3'-phosphate
  modified_base 10: mod_base = OTHER; note = 2'-fluoroadenosine-3'-phosphate
  modified_base 11: mod_base = OTHER; note = 2'-O-methyladenosine-3'-phosphate
  modified_base 12: mod_base = OTHER; note = 2'-O-methyladenosine-3'-phosphate
  modified_base 13: mod_base = OTHER; note = 2'-O-methylcytidine-3'-phosphate
  modified_base 14: mod_base = OTHER; note = 2'-fluoroadenosine-3'-phosphate
  modified_base 15: mod_base = OTHER; note = 2'-O-methylguanosine-3'-phosphate
  modified_base 16: mod_base = OTHER; note = 2'-fluoroguanosine-3'-phosphate
  modified_base 17: mod_base = OTHER; note = 2'-fluorouridine-3'-phosphate
  modified_base 18: mod_base = OTHER; note = 2'-fluorocytidine-3'-phosphate
  modified_base 19: mod_base = OTHER; note = 2'-O-methyluridine-3'-phosphate
  modified_base 20: mod_base = OTHER; note = 2'-fluoroadenosine-3'-phosphate
  modified_base 21: mod_base = OTHER; note = 2'-O-methylguanosine-3'-phosphorothioate
  modified_base 22: mod_base = OTHER; note = 2'-fluoroadenosine-3'-phosphorothioate
  modified_base 23: mod_base = OTHER; note = 2'-O-methyladenosine-3'-phosphate
acaaaagcaaaacaggtctagaa

SEQ ID NO: 519 - RNA, 21 nt, synthetic construct
  source 1..21: mol_type = other RNA; note = Description of Artificial Sequence: Synthetic oligonucleotide
  modified_base 1: mod_base = OTHER; note = 2'-fluorocytidine-3'-phosphate
  modified_base 2: mod_base = OTHER; note = 2'-fluorouridine-3'-phosphate
  modified_base 3: mod_base = OTHER; note = 2'-fluoroadenosine-3'-phosphate
  modified_base 4: mod_base = OTHER; note = 2'-fluoroguanosine-3'-phosphate
  modified_base 5: mod_base = OTHER; note = 2'-fluoroadenosine-3'-phosphate
  modified_base 6: mod_base = OTHER; note = 2'-fluorocytidine-3'-phosphate
  modified_base 7: mod_base = OTHER; note = 2'-fluorocytidine-3'-phosphate
  modified_base 8: mod_base = OTHER; note = 2'-fluorouridine-3'-phosphate
  modified_base 9: mod_base = OTHER; note = 2'-fluoroguanosine-3'-phosphate
  modified_base 10: mod_base = OTHER; note = 2'-fluorouridine-3'-phosphate
  modified_base 11: mod_base = OTHER; note = 2'-fluorouridine-3'-phosphate
  modified_base 12: mod_base = OTHER; note = 2'-fluorouridine-3'-phosphate
  modified_base 13: mod_base = OTHER; note = 2'-fluorouridine-3'-phosphate
  modified_base 14: mod_base = OTHER; note = 2'-fluoroguanosine-3'-phosphate
  modified_base 15: mod_base = OTHER; note = 2'-fluorocytidine-3'-phosphate
  modified_base 16: mod_base = OTHER; note = 2'-fluorouridine-3'-phosphate
  modified_base 17: mod_base = OTHER; note = 2'-fluorouridine-3'-phosphate
  modified_base 18: mod_base = OTHER; note = 2'-fluorouridine-3'-phosphate
  modified_base 19: mod_base = OTHER; note = 2'-fluorouridine-3'-phosphate
  modified_base 20: mod_base = OTHER; note = 2'-fluoroguanosine-3'-phosphate
  modified_base 21: mod_base = OTHER; note = 2'-fluorouridine-3'-phosphate N-[tris(GalNAc-alkyl)-amidodecanoyl)]-4-hydroxyprolinol Hyp-(GalNAc-alkyl)3
ctagacctgttttgcttttgt

SEQ ID NO: 520 - RNA, 23 nt, synthetic construct
  source 1..23: mol_type = other RNA; note = Description of Artificial Sequence: Synthetic oligonucleotide
  modified_base 1: mod_base = OTHER; note = 2'-O-methyladenosine-3'-phosphate
  modified_base 2: mod_base = OTHER; note = 2'-fluorocytidine-3'-phosphate
  modified_base 3: mod_base = OTHER; note = 2'-O-methyladenosine-3'-phosphate
  modified_base 4: mod_base = OTHER; note = 2'-fluoroadenosine-3'-phosphate
  modified_base 5: mod_base = OTHER; note = 2'-fluoroadenosine-3'-phosphate
  modified_base 6: mod_base = OTHER; note = 2'-fluoroadenosine-3'-phosphate
  modified_base 7: mod_base = OTHER; note = 2'-fluoroguanosine-3'-phosphate
  modified_base 8: mod_base = OTHER; note = 2'-fluorocytidine-3'-phosphate
  modified_base 9: mod_base = OTHER; note = 2'-O-methyladenosine-3'-phosphate
  modified_base 10: mod_base = OTHER; note = 2'-fluoroadenosine-3'-phosphate
  modified_base 11: mod_base = OTHER; note = 2'-O-methyladenosine-3'-phosphate
  modified_base 12: mod_base = OTHER; note = 2'-O-methyladenosine-3'-phosphate
  modified_base 13: mod_base = OTHER; note = 2'-O-methylcytidine-3'-phosphate
  modified_base 14: mod_base = OTHER; note = 2'-fluoroadenosine-3'-phosphate
  modified_base 15: mod_base = OTHER; note = 2'-O-methylguanosine-3'-phosphate
  modified_base 16: mod_base = OTHER; note = 2'-fluoroguanosine-3'-phosphate
  modified_base 17: mod_base = OTHER; note = 2'-fluorouridine-3'-phosphate
  modified_base 18: mod_base = OTHER; note = 2'-fluorocytidine-3'-phosphate
  modified_base 19: mod_base = OTHER; note = 2'-O-methyluridine-3'-phosphate
  modified_base 20: mod_base = OTHER; note = 2'-fluoroadenosine-3'-phosphate
  modified_base 21: mod_base = OTHER; note = 2'-O-methylguanosine-3'-phosphorothioate
  modified_base 22: mod_base = OTHER; note = 2'-fluoroadenosine-3'-phosphorothioate
  modified_base 23: mod_base = OTHER; note = 2'-O-methyladenosine-3'-phosphate
acaaaagcaaaacaggtctagaa

SEQ ID NO: 521 - RNA, 21 nt, synthetic construct
  source 1..21: mol_type = other RNA; note = Description of Artificial Sequence: Synthetic oligonucleotide
  modified_base 1: mod_base = OTHER; note = 2'-fluorocytidine-3'-phosphate
  modified_base 2: mod_base = OTHER; note = 2'-O-methyluridine-3'-phosphate
  modified_base 3: mod_base = OTHER; note = 2'-fluoroadenosine-3'-phosphate
  modified_base 4: mod_base = OTHER; note = 2'-O-methylguanosine-3'-phosphate
  modified_base 5: mod_base = OTHER; note = 2'-fluoroadenosine-3'-phosphate
  modified_base 6: mod_base = OTHER; note = 2'-O-methylcytidine-3'-phosphate
  modified_base 7: mod_base = OTHER; note = 2'-fluorocytidine-3'-phosphate
  modified_base 8: mod_base = OTHER; note = 2'-O-methyluridine-3'-phosphate
  modified_base 9: mod_base = OTHER; note = 2'-fluoroguanosine-3'-phosphate
  modified_base 10: mod_base = OTHER; note = 2'-fluorouridine-3'-phosphate
  modified_base 11: mod_base = OTHER; note = 2'-fluorouridine-3'-phosphate
  modified_base 12: mod_base = OTHER; note = 2'-O-methyluridine-3'-phosphate
  modified_base 13: mod_base = OTHER; note = 2'-fluorouridine-3'-phosphate
  modified_base 14: mod_base = OTHER; note = 2'-O-methylguanosine-3'-phosphate
  modified_base 15: mod_base = OTHER; note = 2'-fluorocytidine-3'-phosphate
  modified_base 16: mod_base = OTHER; note = 2'-O-methyluridine-3'-phosphate
  modified_base 17: mod_base = OTHER; note = 2'-fluorouridine-3'-phosphate
  modified_base 18: mod_base = OTHER; note = 2'-O-methyluridine-3'-phosphate
  modified_base 19: mod_base = OTHER; note = 2'-O-methyluridine-3'-phosphate
  modified_base 20: mod_base = OTHER; note = 2'-O-methylguanosine-3'-phosphate
  modified_base 21: mod_base = OTHER; note = 2'-fluorouridine-3'-phosphate N-[tris(GalNAc-alkyl)-amidodecanoyl)]-4-hydroxyprolinol Hyp-(GalNAc-alkyl)3
ctagacctgttttgcttttgt

SEQ ID NO: 522 - RNA, 23 nt, synthetic construct
  source 1..23: mol_type = other RNA; note = Description of Artificial Sequence: Synthetic oligonucleotide
  modified_base 1: mod_base = OTHER; note = 2'-O-methyladenosine-3'-phosphate
  modified_base 2: mod_base = OTHER; note = 2'-fluorocytidine-3'-phosphate
  modified_base 3: mod_base = OTHER; note = 2'-fluoroadenosine-3'-phosphate
  modified_base 4: mod_base = OTHER; note = 2'-fluoroadenosine-3'-phosphate
  modified_base 5: mod_base = OTHER; note = 2'-O-methyladenosine-3'-phosphate
  modified_base 6: mod_base = OTHER; note = 2'-fluoroadenosine-3'-phosphate
  modified_base 7: mod_base = OTHER; note = 2'-O-methylguanosine-3'-phosphate
  modified_base 8: mod_base = OTHER; note = 2'-fluorocytidine-3'-phosphate
  modified_base 9: mod_base = OTHER; note = 2'-O-methyladenosine-3'-phosphate
  modified_base 10: mod_base = OTHER; note = 2'-fluoroadenosine-3'-phosphate
  modified_base 11: mod_base = OTHER; note = 2'-O-methyladenosine-3'-phosphate
  modified_base 12: mod_base = OTHER; note = 2'-O-methyladenosine-3'-phosphate
  modified_base 13: mod_base = OTHER; note = 2'-O-methylcytidine-3'-phosphate
  modified_base 14: mod_base = OTHER; note = 2'-fluoroadenosine-3'-phosphate
  modified_base 15: mod_base = OTHER; note = 2'-O-methylguanosine-3'-phosphate
  modified_base 16: mod_base = OTHER; note = 2'-fluoroguanosine-3'-phosphate
  modified_base 17: mod_base = OTHER; note = 2'-O-methyluridine-3'-phosphate
  modified_base 18: mod_base = OTHER; note = 2'-fluorocytidine-3'-phosphate
  modified_base 19: mod_base = OTHER; note = 2'-O-methyluridine-3'-phosphate
  modified_base 20: mod_base = OTHER; note = 2'-fluoroadenosine-3'-phosphate
  modified_base 21: mod_base = OTHER; note = 2'-O-methylguanosine-3'-phosphorothioate
  modified_base 22: mod_base = OTHER; note = 2'-fluoroadenosine-3'-phosphorothioate
  modified_base 23: mod_base = OTHER; note = 2'-O-methyladenosine-3'-phosphate
acaaaagcaaaacaggtctagaa

SEQ ID NO: 523 - RNA, 21 nt, synthetic construct
  source 1..21: mol_type = other RNA; note = Description of Artificial Sequence: Synthetic oligonucleotide
  modified_base 1: mod_base = OTHER; note = 2'-fluorocytidine-3'-phosphate
  modified_base 2: mod_base = OTHER; note = 2'-O-methyluridine-3'-phosphate
  modified_base 3: mod_base = OTHER; note = 2'-fluoroadenosine-3'-phosphate
  modified_base 4: mod_base = OTHER; note = 2'-O-methylguanosine-3'-phosphate
  modified_base 5: mod_base = OTHER; note = 2'-fluoroadenosine-3'-phosphate
  modified_base 6: mod_base = OTHER; note = 2'-O-methylcytidine-3'-phosphate
  modified_base 7: mod_base = OTHER; note = 2'-fluorocytidine-3'-phosphate
  modified_base 8: mod_base = OTHER; note = 2'-O-methyluridine-3'-phosphate
  modified_base 9: mod_base = OTHER; note = 2'-fluoroguanosine-3'-phosphate
  modified_base 10: mod_base = OTHER; note = 2'-fluorouridine-3'-phosphate
  modified_base 11: mod_base = OTHER; note = 2'-fluorouridine-3'-phosphate
  modified_base 12: mod_base = OTHER; note = 2'-O-methyluridine-3'-phosphate
  modified_base 13: mod_base = OTHER; note = 2'-fluorouridine-3'-phosphate
  modified_base 14: mod_base = OTHER; note = 2'-O-methylguanosine-3'-phosphate
  modified_base 15: mod_base = OTHER; note = 2'-fluorocytidine-3'-phosphate
  modified_base 16: mod_base = OTHER; note = 2'-O-methyluridine-3'-phosphate
  modified_base 17: mod_base = OTHER; note = 2'-O-methyluridine-3'-phosphate
  modified_base 18: mod_base = OTHER; note = 2'-O-methyluridine-3'-phosphate
  modified_base 19: mod_base = OTHER; note = 2'-fluorouridine-3'-phosphate
  modified_base 20: mod_base = OTHER; note = 2'-O-methylguanosine-3'-phosphate
  modified_base 21: mod_base = OTHER; note = 2'-fluorouridine-3'-phosphate N-[tris(GalNAc-alkyl)-amidodecanoyl)]-4-hydroxyprolinol Hyp-(GalNAc-alkyl)3
ctagacctgttttgcttttgt

SEQ ID NO: 524 - RNA, 23 nt, synthetic construct
  source 1..23: mol_type = other RNA; note = Description of Artificial Sequence: Synthetic oligonucleotide
  modified_base 1: mod_base = OTHER; note = 2'-O-methyladenosine-3'-phosphate
  modified_base 2: mod_base = OTHER; note = 2'-fluorocytidine-3'-phosphate
  modified_base 3: mod_base = OTHER; note = 2'-O-methyladenosine-3'-phosphate
  modified_base 4: mod_base = OTHER; note = 2'-fluoroadenosine-3'-phosphate
  modified_base 5: mod_base = OTHER; note = 2'-fluoroadenosine-3'-phosphate
  modified_base 6: mod_base = OTHER; note = 2'-fluoroadenosine-3'-phosphate
  modified_base 7: mod_base = OTHER; note = 2'-O-methylguanosine-3'-phosphate
  modified_base 8: mod_base = OTHER; note = 2'-fluorocytidine-3'-phosphate
  modified_base 9: mod_base = OTHER; note = 2'-O-methyladenosine-3'-phosphate
  modified_base 10: mod_base = OTHER; note = 2'-fluoroadenosine-3'-phosphate
  modified_base 11: mod_base = OTHER; note = 2'-O-methyladenosine-3'-phosphate
  modified_base 12: mod_base = OTHER; note = 2'-O-methyladenosine-3'-phosphate
  modified_base 13: mod_base = OTHER; note = 2'-O-methylcytidine-3'-phosphate
  modified_base 14: mod_base = OTHER; note = 2'-fluoroadenosine-3'-phosphate
  modified_base 15: mod_base = OTHER; note = 2'-O-methylguanosine-3'-phosphate
  modified_base 16: mod_base = OTHER; note = 2'-fluoroguanosine-3'-phosphate
  modified_base 17: mod_base = OTHER; note = 2'-O-methyluridine-3'-phosphate
  modified_base 18: mod_base = OTHER; note = 2'-fluorocytidine-3'-phosphate
  modified_base 19: mod_base = OTHER; note = 2'-O-methyluridine-3'-phosphate
  modified_base 20: mod_base = OTHER; note = 2'-fluoroadenosine-3'-phosphate
  modified_base 21: mod_base = OTHER; note = 2'-O-methylguanosine-3'-phosphorothioate
  modified_base 22: mod_base = OTHER; note = 2'-fluoroadenosine-3'-phosphorothioate
  modified_base 23: mod_base = OTHER; note = 2'-O-methyladenosine-3'-phosphate
acaaaagcaaaacaggtctagaa

SEQ ID NO: 525 - RNA, 21 nt, synthetic construct
  source 1..21: mol_type = other RNA; note = Description of Artificial Sequence: Synthetic oligonucleotide
  modified_base 1: mod_base = OTHER; note = 2'-fluorocytidine-3'-phosphate
  modified_base 2: mod_base = OTHER; note = 2'-O-methyluridine-3'-phosphate
  modified_base 3: mod_base = OTHER; note = 2'-fluoroadenosine-3'-phosphate
  modified_base 4: mod_base = OTHER; note = 2'-O-methylguanosine-3'-phosphate
  modified_base 5: mod_base = OTHER; note = 2'-fluoroadenosine-3'-phosphate
  modified_base 6: mod_base = OTHER; note = 2'-O-methylcytidine-3'-phosphate
  modified_base 7: mod_base = OTHER; note = 2'-fluorocytidine-3'-phosphate
  modified_base 8: mod_base = OTHER; note = 2'-O-methyluridine-3'-phosphate
  modified_base 9: mod_base = OTHER; note = 2'-fluoroguanosine-3'-phosphate
  modified_base 10: mod_base = OTHER; note = 2'-fluorouridine-3'-phosphate
  modified_base 11: mod_base = OTHER; note = 2'-fluorouridine-3'-phosphate
  modified_base 12: mod_base = OTHER; note = 2'-O-methyluridine-3'-phosphate
  modified_base 13: mod_base = OTHER; note = 2'-fluorouridine-3'-phosphate
  modified_base 14: mod_base = OTHER; note = 2'-O-methylguanosine-3'-phosphate
  modified_base 15: mod_base = OTHER; note = 2'-O-methylcytidine-3'-phosphate
  modified_base 16: mod_base = OTHER; note = 2'-O-methyluridine-3'-phosphate
  modified_base 17: mod_base = OTHER; note = 2'-fluorouridine-3'-phosphate
  modified_base 18: mod_base = OTHER; note = 2'-O-methyluridine-3'-phosphate
  modified_base 19: mod_base = OTHER; note = 2'-fluorouridine-3'-phosphate
  modified_base 20: mod_base = OTHER; note = 2'-O-methylguanosine-3'-phosphate
  modified_base 21: mod_base = OTHER; note = 2'-fluorouridine-3'-phosphate N-[tris(GalNAc-alkyl)-amidodecanoyl)]-4-hydroxyprolinol Hyp-(GalNAc-alkyl)3
ctagacctgttttgcttttgt

SEQ ID NO: 526 - RNA, 23 nt, synthetic construct
  source 1..23: mol_type = other RNA; note = Description of Artificial Sequence: Synthetic oligonucleotide
  modified_base 1: mod_base = OTHER; note = 2'-O-methyladenosine-3'-phosphate
  modified_base 2: mod_base = OTHER; note = 2'-fluorocytidine-3'-phosphate
  modified_base 3: mod_base = OTHER; note = 2'-O-methyladenosine-3'-phosphate
  modified_base 4: mod_base = OTHER; note = 2'-fluoroadenosine-3'-phosphate
  modified_base 5: mod_base = OTHER; note = 2'-O-methyladenosine-3'-phosphate
  modified_base 6: mod_base = OTHER; note = 2'-fluoroadenosine-3'-phosphate
  modified_base 7: mod_base = OTHER; note = 2'-fluoroguanosine-3'-phosphate
  modified_base 8: mod_base = OTHER; note = 2'-fluorocytidine-3'-phosphate
  modified_base 9: mod_base = OTHER; note = 2'-O-methyladenosine-3'-phosphate
  modified_base 10: mod_base = OTHER; note = 2'-fluoroadenosine-3'-phosphate
  modified_base 11: mod_base = OTHER; note = 2'-O-methyladenosine-3'-phosphate
  modified_base 12: mod_base = OTHER; note = 2'-O-methyladenosine-3'-phosphate
  modified_base 13: mod_base = OTHER; note = 2'-O-methylcytidine-3'-phosphate
  modified_base 14: mod_base = OTHER; note = 2'-fluoroadenosine-3'-phosphate
  modified_base 15: mod_base = OTHER; note = 2'-O-methylguanosine-3'-phosphate
  modified_base 16: mod_base = OTHER; note = 2'-fluoroguanosine-3'-phosphate
  modified_base 17: mod_base = OTHER; note = 2'-O-methyluridine-3'-phosphate
  modified_base 18: mod_base = OTHER; note = 2'-fluorocytidine-3'-phosphate
  modified_base 19: mod_base = OTHER; note = 2'-O-methyluridine-3'-phosphate
  modified_base 20: mod_base = OTHER; note = 2'-fluoroadenosine-3'-phosphate
  modified_base 21: mod_base = OTHER; note = 2'-O-methylguanosine-3'-phosphorothioate
  modified_base 22: mod_base = OTHER; note = 2'-fluoroadenosine-3'-phosphorothioate
  modified_base 23: mod_base = OTHER; note = 2'-O-methyladenosine-3'-phosphate
acaaaagcaaaacaggtctagaa

SEQ ID NO: 527 - RNA, 21 nt, synthetic construct
  source 1..21: mol_type = other RNA; note = Description of Artificial Sequence: Synthetic oligonucleotide
  modified_base 1: mod_base = OTHER; note = 2'-fluorocytidine-3'-phosphate
  modified_base 2: mod_base = OTHER; note = 2'-O-methyluridine-3'-phosphate
  modified_base 3: mod_base = OTHER; note = 2'-fluoroadenosine-3'-phosphate
  modified_base 4: mod_base = OTHER; note = 2'-O-methylguanosine-3'-phosphate
  modified_base 5: mod_base = OTHER; note = 2'-fluoroadenosine-3'-phosphate
  modified_base 6: mod_base = OTHER; note = 2'-O-methylcytidine-3'-phosphate
  modified_base 7: mod_base = OTHER; note = 2'-fluorocytidine-3'-phosphate
  modified_base 8: mod_base = OTHER; note = 2'-O-methyluridine-3'-phosphate
  modified_base 9: mod_base = OTHER; note = 2'-fluoroguanosine-3'-phosphate
  modified_base 10: mod_base = OTHER; note = 2'-fluorouridine-3'-phosphate
  modified_base 11: mod_base = OTHER; note = 2'-fluorouridine-3'-phosphate
  modified_base 12: mod_base = OTHER; note = 2'-O-methyluridine-3'-phosphate
  modified_base 13: mod_base = OTHER; note = 2'-O-methyluridine-3'-phosphate
  modified_base 14: mod_base = OTHER; note = 2'-O-methylguanosine-3'-phosphate
  modified_base 15: mod_base = OTHER; note = 2'-fluorocytidine-3'-phosphate
  modified_base 16: mod_base = OTHER; note = 2'-O-methyluridine-3'-phosphate
  modified_base 17: mod_base = OTHER; note = 2'-fluorouridine-3'-phosphate
  modified_base 18: mod_base = OTHER; note = 2'-O-methyluridine-3'-phosphate
  modified_base 19: mod_base = OTHER; note = 2'-fluorouridine-3'-phosphate
  modified_base 20: mod_base = OTHER; note = 2'-O-methylguanosine-3'-phosphate
  modified_base 21: mod_base = OTHER; note = 2'-fluorouridine-3'-phosphate N-[tris(GalNAc-alkyl)-amidodecanoyl)]-4-hydroxyprolinol Hyp-(GalNAc-alkyl)3
ctagacctgttttgcttttgt

SEQ ID NO: 528 - RNA, 23 nt, synthetic construct
  source 1..23: mol_type = other RNA; note = Description of Artificial Sequence: Synthetic oligonucleotide
  modified_base 1: mod_base = OTHER; note = 2'-O-methyladenosine-3'-phosphate
  modified_base 2: mod_base = OTHER; note = 2'-fluorocytidine-3'-phosphate
  modified_base 3: mod_base = OTHER; note = 2'-O-methyladenosine-3'-phosphate
  modified_base 4: mod_base = OTHER; note = 2'-fluoroadenosine-3'-phosphate
  modified_base 5: mod_base = OTHER; note = 2'-O-methyladenosine-3'-phosphate
  modified_base 6: mod_base = OTHER; note = 2'-fluoroadenosine-3'-phosphate
  modified_base 7: mod_base = OTHER; note = 2'-O-methylguanosine-3'-phosphate
  modified_base 8: mod_base = OTHER; note = 2'-fluorocytidine-3'-phosphate
  modified_base 9: mod_base = OTHER; note = 2'-fluoroadenosine-3'-phosphate
  modified_base 10: mod_base = OTHER; note = 2'-fluoroadenosine-3'-phosphate
  modified_base 11: mod_base = OTHER; note = 2'-O-methyladenosine-3'-phosphate
  modified_base 12: mod_base = OTHER; note = 2'-O-methyladenosine-3'-phosphate
  modified_base 13: mod_base = OTHER; note = 2'-O-methylcytidine-3'-phosphate
  modified_base 14: mod_base = OTHER; note = 2'-fluoroadenosine-3'-phosphate
  modified_base 15: mod_base = OTHER; note = 2'-O-methylguanosine-3'-phosphate
  modified_base 16: mod_base = OTHER; note = 2'-fluoroguanosine-3'-phosphate
  modified_base 17: mod_base = OTHER; note = 2'-O-methyluridine-3'-phosphate
  modified_base 18: mod_base = OTHER; note = 2'-fluorocytidine-3'-phosphate
  modified_base 19: mod_base = OTHER; note = 2'-O-methyluridine-3'-phosphate
  modified_base 20: mod_base = OTHER; note = 2'-fluoroadenosine-3'-phosphate
  modified_base 21: mod_base = OTHER; note = 2'-O-methylguanosine-3'-phosphorothioate
  modified_base 22: mod_base = OTHER; note = 2'-fluoroadenosine-3'-phosphorothioate
  modified_base 23: mod_base = OTHER; note = 2'-O-methyladenosine-3'-phosphate
acaaaagcaaaacaggtctagaa

SEQ ID NO: 529 - RNA, 21 nt, synthetic construct
  source 1..21: mol_type = other RNA; note = Description of Artificial Sequence: Synthetic oligonucleotide
  modified_base 1: mod_base = OTHER; note = 2'-fluorocytidine-3'-phosphate
  modified_base 2: mod_base = OTHER; note = 2'-O-methyluridine-3'-phosphate
  modified_base 3: mod_base = OTHER; note = 2'-fluoroadenosine-3'-phosphate
  modified_base 4: mod_base = OTHER; note = 2'-O-methylguanosine-3'-phosphate
  modified_base 5: mod_base = OTHER; note = 2'-fluoroadenosine-3'-phosphate
  modified_base 6: mod_base = OTHER; note = 2'-O-methylcytidine-3'-phosphate
  modified_base 7: mod_base = OTHER; note = 2'-O-methylcytidine-3'-phosphate
  modified_base 8: mod_base = OTHER; note = 2'-O-methyluridine-3'-phosphate
  modified_base 9: mod_base = OTHER; note = 2'-fluoroguanosine-3'-phosphate
  modified_base 10: mod_base = OTHER; note = 2'-fluorouridine-3'-phosphate
  modified_base 11: mod_base = OTHER; note = 2'-fluorouridine-3'-phosphate
  modified_base 12: mod_base = OTHER; note = 2'-O-methyluridine-3'-phosphate
  modified_base 13: mod_base = OTHER; note = 2'-fluorouridine-3'-phosphate
  modified_base 14: mod_base = OTHER; note = 2'-O-methylguanosine-3'-phosphate
  modified_base 15: mod_base = OTHER; note = 2'-fluorocytidine-3'-phosphate
  modified_base 16: mod_base = OTHER; note = 2'-O-methyluridine-3'-phosphate
  modified_base 17: mod_base = OTHER; note = 2'-fluorouridine-3'-phosphate
  modified_base 18: mod_base = OTHER; note = 2'-O-methyluridine-3'-phosphate
  modified_base 19: mod_base = OTHER; note = 2'-fluorouridine-3'-phosphate
  modified_base 20: mod_base = OTHER; note = 2'-O-methylguanosine-3'-phosphate
  modified_base 21: mod_base = OTHER; note = 2'-fluorouridine-3'-phosphate N-[tris(GalNAc-alkyl)-amidodecanoyl)]-4-hydroxyprolinol Hyp-(GalNAc-alkyl)3
ctagacctgttttgcttttgt

SEQ ID NO: 530 - RNA, 23 nt, synthetic construct
  source 1..23: mol_type = other RNA; note = Description of Artificial Sequence: Synthetic oligonucleotide
  modified_base 1: mod_base = OTHER; note = 2'-O-methyladenosine-3'-phosphate
  modified_base 2: mod_base = OTHER; note = 2'-fluorocytidine-3'-phosphate
  modified_base 3: mod_base = OTHER; note = 2'-O-methyladenosine-3'-phosphate
  modified_base 4: mod_base = OTHER; note = 2'-fluoroadenosine-3'-phosphate
  modified_base 5: mod_base = OTHER; note = 2'-O-methyladenosine-3'-phosphate
  modified_base 6: mod_base = OTHER; note = 2'-fluoroadenosine-3'-phosphate
  modified_base 7: mod_base = OTHER; note = 2'-O-methylguanosine-3'-phosphate
  modified_base 8: mod_base = OTHER; note = 2'-fluorocytidine-3'-phosphate
  modified_base 9: mod_base = OTHER; note = 2'-O-methyladenosine-3'-phosphate
  modified_base 10: mod_base = OTHER; note = 2'-fluoroadenosine-3'-phosphate
  modified_base 11: mod_base = OTHER; note = 2'-O-methyladenosine-3'-phosphate
  modified_base 12: mod_base = OTHER; note = 2'-O-methyladenosine-3'-phosphate
  modified_base 13: mod_base = OTHER; note = 2'-O-methylcytidine-3'-phosphate
  modified_base 14: mod_base = OTHER; note = 2'-fluoroadenosine-3'-phosphate
  modified_base 15: mod_base = OTHER; note = 2'-fluoroguanosine-3'-phosphate
  modified_base 16: mod_base = OTHER; note = 2'-fluoroguanosine-3'-phosphate
  modified_base 17: mod_base = OTHER; note = 2'-O-methyluridine-3'-phosphate
  modified_base 18: mod_base = OTHER; note = 2'-fluorocytidine-3'-phosphate
  modified_base 19: mod_base = OTHER; note = 2'-O-methyluridine-3'-phosphate
  modified_base 20: mod_base = OTHER; note = 2'-fluoroadenosine-3'-phosphate
  modified_base 21: mod_base = OTHER; note = 2'-O-methylguanosine-3'-phosphorothioate
  modified_base 22: mod_base = OTHER; note = 2'-fluoroadenosine-3'-phosphorothioate
  modified_base 23: mod_base = OTHER; note = 2'-O-methyladenosine-3'-phosphate
acaaaagcaaaacaggtctagaa

SEQ ID NO: 531 - RNA, 21 nt, synthetic construct
  source 1..21: mol_type = other RNA; note = Description of Artificial Sequence: Synthetic oligonucleotide
  modified_base 1: mod_base = OTHER; note = 2'-fluorocytidine-3'-phosphate
  modified_base 2: mod_base = OTHER; note = 2'-O-methyluridine-3'-phosphate
  modified_base 3: mod_base = OTHER; note = 2'-fluoroadenosine-3'-phosphate
  modified_base 4: mod_base = OTHER; note = 2'-O-methylguanosine-3'-phosphate
  modified_base 5: mod_base = OTHER; note = 2'-O-methyladenosine-3'-phosphate
  modified_base 6: mod_base = OTHER; note = 2'-O-methylcytidine-3'-phosphate
  modified_base 7: mod_base = OTHER; note = 2'-fluorocytidine-3'-phosphate
  modified_base 8: mod_base = OTHER; note = 2'-O-methyluridine-3'-phosphate
  modified_base 9: mod_base = OTHER; note = 2'-fluoroguanosine-3'-phosphate
  modified_base 10: mod_base = OTHER; note = 2'-fluorouridine-3'-phosphate
  modified_base 11: mod_base = OTHER; note = 2'-fluorouridine-3'-phosphate
  modified_base 12: mod_base = OTHER; note = 2'-O-methyluridine-3'-phosphate
  modified_base 13: mod_base = OTHER; note = 2'-fluorouridine-3'-phosphate
  modified_base 14: mod_base = OTHER; note = 2'-O-methylguanosine-3'-phosphate
  modified_base 15: mod_base = OTHER; note = 2'-fluorocytidine-3'-phosphate
  modified_base 16: mod_base = OTHER; note = 2'-O-methyluridine-3'-phosphate
  modified_base 17: mod_base = OTHER; note = 2'-fluorouridine-3'-phosphate
  modified_base 18: mod_base = OTHER; note = 2'-O-methyluridine-3'-phosphate
  modified_base 19: mod_base = OTHER; note = 2'-fluorouridine-3'-phosphate
  modified_base 20: mod_base = OTHER; note = 2'-O-methylguanosine-3'-phosphate
  modified_base 21: mod_base = OTHER; note = 2'-fluorouridine-3'-phosphate N-[tris(GalNAc-alkyl)-amidodecanoyl)]-4-hydroxyprolinol Hyp-(GalNAc-alkyl)3
ctagacctgttttgcttttgt

SEQ ID NO: 532 - RNA, 23 nt, synthetic construct
  source 1..23: mol_type = other RNA; note = Description of Artificial Sequence: Synthetic oligonucleotide
  modified_base 1: mod_base = OTHER; note = 2'-O-methyladenosine-3'-phosphate
  modified_base 2: mod_base = OTHER; note = 2'-fluorocytidine-3'-phosphate
  modified_base 3: mod_base = OTHER; note = 2'-O-methyladenosine-3'-phosphate
  modified_base 4: mod_base = OTHER; note = 2'-fluoroadenosine-3'-phosphate
  modified_base 5: mod_base = OTHER; note = 2'-O-methyladenosine-3'-phosphate
  modified_base 6: mod_base = OTHER; note = 2'-fluoroadenosine-3'-phosphate
  modified_base 7: mod_base = OTHER; note = 2'-O-methylguanosine-3'-phosphate
  modified_base 8: mod_base = OTHER; note = 2'-fluorocytidine-3'-phosphate
  modified_base 9: mod_base = OTHER; note = 2'-O-methyladenosine-3'-phosphate
  modified_base 10: mod_base = OTHER; note = 2'-fluoroadenosine-3'-phosphate
  modified_base 11: mod_base = OTHER; note = 2'-O-methyladenosine-3'-phosphate
  modified_base 12: mod_base = OTHER; note = 2'-O-methyladenosine-3'-phosphate
  modified_base 13: mod_base = OTHER; note = 2'-O-methylcytidine-3'-phosphate
  modified_base 14: mod_base = OTHER; note = 2'-fluoroadenosine-3'-phosphate
  modified_base 15: mod_base = OTHER; note = 2'-O-methylguanosine-3'-phosphate
  modified_base 16: mod_base = OTHER; note = 2'-fluoroguanosine-3'-phosphate
  modified_base 17: mod_base = OTHER; note = 2'-fluorouridine-3'-phosphate
  modified_base 18: mod_base = OTHER; note = 2'-fluorocytidine-3'-phosphate
  modified_base 19: mod_base = OTHER; note = 2'-O-methyluridine-3'-phosphate
  modified_base 20: mod_base = OTHER; note = 2'-fluoroadenosine-3'-phosphate
  modified_base 21: mod_base = OTHER; note = 2'-O-methylguanosine-3'-phosphorothioate
  modified_base 22: mod_base = OTHER; note = 2'-fluoroadenosine-3'-phosphorothioate
  modified_base 23: mod_base = OTHER; note = 2'-O-methyladenosine-3'-phosphate
acaaaagcaaaacaggtctagaa

SEQ ID NO: 533 - RNA, 21 nt, synthetic construct
  source 1..21: mol_type = other RNA; note = Description of Artificial Sequence: Synthetic oligonucleotide
  modified_base 1: mod_base = OTHER; note = 2'-fluorocytidine-3'-phosphate
  modified_base 2: mod_base = OTHER; note = 2'-O-methyluridine-3'-phosphate
  modified_base 3: mod_base = OTHER; note = 2'-O-methyladenosine-3'-phosphate
  modified_base 4: mod_base = OTHER; note = 2'-O-methylguanosine-3'-phosphate
  modified_base 5: mod_base = OTHER; note = 2'-fluoroadenosine-3'-phosphate
  modified_base 6: mod_base = OTHER; note = 2'-O-methylcytidine-3'-phosphate
  modified_base 7: mod_base = OTHER; note = 2'-fluorocytidine-3'-phosphate
  modified_base 8: mod_base = OTHER; note = 2'-O-methyluridine-3'-phosphate
  modified_base 9: mod_base = OTHER; note = 2'-fluoroguanosine-3'-phosphate
  modified_base 10: mod_base = OTHER; note = 2'-fluorouridine-3'-phosphate
  modified_base 11: mod_base = OTHER; note = 2'-fluorouridine-3'-phosphate
  modified_base 12: mod_base = OTHER; note = 2'-O-methyluridine-3'-phosphate
  modified_base 13: mod_base = OTHER; note = 2'-fluorouridine-3'-phosphate
  modified_base 14: mod_base = OTHER; note = 2'-O-methylguanosine-3'-phosphate
  modified_base 15: mod_base = OTHER; note = 2'-fluorocytidine-3'-phosphate
  modified_base 16: mod_base = OTHER; note = 2'-O-methyluridine-3'-phosphate
  modified_base 17: mod_base = OTHER; note = 2'-fluorouridine-3'-phosphate
  modified_base 18: mod_base = OTHER; note = 2'-O-methyluridine-3'-phosphate
  modified_base 19: mod_base = OTHER; note = 2'-fluorouridine-3'-phosphate
  modified_base 20: mod_base = OTHER; note = 2'-O-methylguanosine-3'-phosphate
  modified_base 21: mod_base = OTHER; note = 2'-fluorouridine-3'-phosphate N-[tris(GalNAc-alkyl)-amidodecanoyl)]-4-hydroxyprolinol Hyp-(GalNAc-alkyl)3
ctagacctgttttgcttttgt

SEQ ID NO: 534 - RNA, 23 nt, synthetic construct
  source 1..23: mol_type = other RNA; note = Description of Artificial Sequence: Synthetic oligonucleotide
  modified_base 1: mod_base = OTHER; note = 2'-O-methyladenosine-3'-phosphate
  modified_base 2: mod_base = OTHER; note = 2'-fluorocytidine-3'-phosphate
  modified_base 3: mod_base = OTHER; note = 2'-O-methyladenosine-3'-phosphate
  modified_base 4: mod_base = OTHER; note = 2'-fluoroadenosine-3'-phosphate
  modified_base 5: mod_base = OTHER; note = 2'-O-methyladenosine-3'-phosphate
  modified_base 6: mod_base = OTHER; note = 2'-fluoroadenosine-3'-phosphate
  modified_base 7: mod_base = OTHER; note = 2'-O-methylguanosine-3'-phosphate
  modified_base 8: mod_base = OTHER; note = 2'-fluorocytidine-3'-phosphate
  modified_base 9: mod_base = OTHER; note = 2'-O-methyladenosine-3'-phosphate
  modified_base 10: mod_base = OTHER; note = 2'-fluoroadenosine-3'-phosphate
  modified_base 11: mod_base = OTHER; note = 2'-O-methyladenosine-3'-phosphate
  modified_base 12: mod_base = OTHER; note = 2'-O-methyladenosine-3'-phosphate
  modified_base 13: mod_base = OTHER; note = 2'-O-methylcytidine-3'-phosphate
  modified_base 14: mod_base = OTHER; note = 2'-fluoroadenosine-3'-phosphate
  modified_base 15: mod_base = OTHER; note = 2'-O-methylguanosine-3'-phosphate
  modified_base 16: mod_base = OTHER; note = 2'-fluoroguanosine-3'-phosphate
  modified_base 17: mod_base = OTHER; note = 2'-O-methyluridine-3'-phosphate
  modified_base 18: mod_base = OTHER; note = 2'-fluorocytidine-3'-phosphate
  modified_base 19: mod_base = OTHER; note = 2'-fluorouridine-3'-phosphate
  modified_base 20: mod_base = OTHER; note = 2'-fluoroadenosine-3'-phosphate
  modified_base 21: mod_base = OTHER; note = 2'-O-methylguanosine-3'-phosphorothioate
  modified_base 22: mod_base = OTHER; note = 2'-fluoroadenosine-3'-phosphorothioate
  modified_base 23: mod_base = OTHER; note = 2'-O-methyladenosine-3'-phosphate
acaaaagcaaaacaggtctagaa

SEQ ID NO: 535 - RNA, 21 nt, synthetic construct
  source 1..21: mol_type = other RNA; note = Description of Artificial Sequence: Synthetic oligonucleotide
  modified_base 1: mod_base = OTHER; note = 2'-O-methylcytidine-3'-phosphate
  modified_base 2: mod_base = OTHER; note = 2'-O-methyluridine-3'-phosphate
  modified_base 3: mod_base = OTHER; note = 2'-fluoroadenosine-3'-phosphate
  modified_base 4: mod_base = OTHER; note = 2'-O-methylguanosine-3'-phosphate
  modified_base 5: mod_base = OTHER; note = 2'-fluoroadenosine-3'-phosphate
  modified_base 6: mod_base = OTHER; note = 2'-O-methylcytidine-3'-phosphate
  modified_base 7: mod_base = OTHER; note = 2'-fluorocytidine-3'-phosphate
  modified_base 8: mod_base = OTHER; note = 2'-O-methyluridine-3'-phosphate
  modified_base 9: mod_base = OTHER; note = 2'-fluoroguanosine-3'-phosphate
  modified_base 10: mod_base = OTHER; note = 2'-fluorouridine-3'-phosphate
  modified_base 11: mod_base = OTHER; note = 2'-fluorouridine-3'-phosphate
  modified_base 12: mod_base = OTHER; note = 2'-O-methyluridine-3'-phosphate
  modified_base 13: mod_base = OTHER; note = 2'-fluorouridine-3'-phosphate
  modified_base 14: mod_base = OTHER; note = 2'-O-methylguanosine-3'-phosphate
  modified_base 15: mod_base = OTHER; note = 2'-fluorocytidine-3'-phosphate
  modified_base 16: mod_base = OTHER; note = 2'-O-methyluridine-3'-phosphate
  modified_base 17: mod_base = OTHER; note = 2'-fluorouridine-3'-phosphate
  modified_base 18: mod_base = OTHER; note = 2'-O-methyluridine-3'-phosphate
  modified_base 19: mod_base = OTHER; note = 2'-fluorouridine-3'-phosphate
  modified_base 20: mod_base = OTHER; note = 2'-O-methylguanosine-3'-phosphate
  modified_base 21: mod_base = OTHER; note = 2'-fluorouridine-3'-phosphate N-[tris(GalNAc-alkyl)-amidodecanoyl)]-4-hydroxyprolinol Hyp-(GalNAc-alkyl)3
ctagacctgttttgcttttgt

SEQ ID NO: 536 - RNA, 23 nt, synthetic construct
  source 1..23: mol_type = other RNA; note = Description of Artificial Sequence: Synthetic oligonucleotide
  modified_base 1: mod_base = OTHER; note = 2'-O-methyladenosine-3'-phosphate
  modified_base 2: mod_base = OTHER; note = 2'-fluorocytidine-3'-phosphate
  modified_base 3: mod_base = OTHER; note = 2'-O-methyladenosine-3'-phosphate
  modified_base 4: mod_base = OTHER; note = 2'-fluoroadenosine-3'-phosphate
  modified_base 5: mod_base = OTHER; note = 2'-O-methyladenosine-3'-phosphate
  modified_base 6: mod_base = OTHER; note = 2'-fluoroadenosine-3'-phosphate
  modified_base 7: mod_base = OTHER; note = 2'-O-methylguanosine-3'-phosphate
  modified_base 8: mod_base = OTHER; note = 2'-fluorocytidine-3'-phosphate
  modified_base 9: mod_base = OTHER; note = 2'-O-methyladenosine-3'-phosphate
  modified_base 10: mod_base = OTHER; note = 2'-fluoroadenosine-3'-phosphate
  modified_base 11: mod_base = OTHER; note = 2'-O-methyladenosine-3'-phosphate
  modified_base 12: mod_base = OTHER; note = 2'-O-methyladenosine-3'-phosphate
  modified_base 13: mod_base = OTHER; note = 2'-O-methylcytidine-3'-phosphate
  modified_base 14: mod_base = OTHER; note = 2'-fluoroadenosine-3'-phosphate
  modified_base 15: mod_base = OTHER; note = 2'-O-methylguanosine-3'-phosphate
  modified_base 16: mod_base = OTHER; note = 2'-fluoroguanosine-3'-phosphate
  modified_base 17: mod_base = OTHER; note = 2'-O-methyluridine-3'-phosphate
  modified_base 18: mod_base = OTHER; note = 2'-fluorocytidine-3'-phosphate
  modified_base 19: mod_base = OTHER; note = 2'-O-methyluridine-3'-phosphate
  modified_base 20: mod_base = OTHER; note = 2'-fluoroadenosine-3'-phosphate
  modified_base 21: mod_base = OTHER; note = 2'-fluoroguanosine-3'-phosphorothioate
  modified_base 22: mod_base = OTHER; note = 2'-fluoroadenosine-3'-phosphorothioate
  modified_base 23: mod_base = OTHER; note = 2'-O-methyladenosine-3'-phosphate
acaaaagcaaaacaggtctagaa

SEQ ID NO: 537 - RNA, 21 nt, synthetic construct
  source 1..21: mol_type = other RNA; note = Description of Artificial Sequence: Synthetic oligonucleotide
  modified_base 1: mod_base = OTHER; note = 2'-fluorocytidine-3'-phosphate
  modified_base 2: mod_base = OTHER; note = 2'-O-methyluridine-3'-phosphate
  modified_base 3: mod_base = OTHER; note = 2'-fluoroadenosine-3'-phosphate
  modified_base 4: mod_base = OTHER; note = 2'-O-methylguanosine-3'-phosphate
  modified_base 5: mod_base = OTHER; note = 2'-fluoroadenosine-3'-phosphate
  modified_base 6: mod_base = OTHER; note = 2'-O-methylcytidine-3'-phosphate
  modified_base 7: mod_base = OTHER; note = 2'-fluorocytidine-3'-phosphate
  modified_base 8: mod_base = OTHER; note = 2'-O-methyluridine-3'-phosphate
  modified_base 9: mod_base = OTHER; note = 2'-fluoroguanosine-3'-phosphate
  modified_base 10: mod_base = OTHER; note = 2'-fluorouridine-3'-phosphate
  modified_base 11: mod_base = OTHER; note = 2'-fluorouridine-3'-phosphate
  modified_base 12: mod_base = OTHER; note = 2'-O-methyluridine-3'-phosphate
  modified_base 13: mod_base = OTHER; note = 2'-fluorouridine-3'-phosphate
  modified_base 14: mod_base = OTHER; note = 2'-O-methylguanosine-3'-phosphate
  modified_base 15: mod_base = OTHER; note = 2'-fluorocytidine-3'-phosphate
  modified_base 16: mod_base = OTHER; note = 2'-O-methyluridine-3'-phosphate
  modified_base 17: mod_base = OTHER; note = 2'-fluorouridine-3'-phosphate
  modified_base 18: mod_base = OTHER; note = 2'-fluorouridine-3'-phosphate
  modified_base 19: mod_base = OTHER; note = 2'-fluorouridine-3'-phosphate
  modified_base 20: mod_base = OTHER; note = 2'-O-methylguanosine-3'-phosphate
  modified_base 21: mod_base = OTHER; note = 2'-fluorouridine-3'-phosphate N-[tris(GalNAc-alkyl)-amidodecanoyl)]-4-hydroxyprolinol Hyp-(GalNAc-alkyl)3
ctagacctgttttgcttttgt

SEQ ID NO: 538 - RNA, 23 nt, synthetic construct
  source 1..23: mol_type = other RNA; note = Description of Artificial Sequence: Synthetic oligonucleotide
  modified_base 1: mod_base = OTHER; note = 2'-O-methyladenosine-3'-phosphate
  modified_base 2: mod_base = OTHER; note = 2'-fluorocytidine-3'-phosphate
  modified_base 3: mod_base = OTHER; note = 2'-O-methyladenosine-3'-phosphate
  modified_base 4: mod_base = OTHER; note = 2'-O-methyladenosine-3'-phosphate
  modified_base 5: mod_base = OTHER; note = 2'-O-methyladenosine-3'-phosphate
  modified_base 6: mod_base = OTHER; note = 2'-fluoroadenosine-3'-phosphate
  modified_base 7: mod_base = OTHER; note = 2'-O-methylguanosine-3'-phosphate
  modified_base 8: mod_base = OTHER; note = 2'-fluorocytidine-3'-phosphate
  modified_base 9: mod_base = OTHER; note = 2'-O-methyladenosine-3'-phosphate
  modified_base 10: mod_base = OTHER; note = 2'-fluoroadenosine-3'-phosphate
  modified_base 11: mod_base = OTHER; note = 2'-O-methyladenosine-3'-phosphate
  modified_base 12: mod_base = OTHER; note = 2'-O-methyladenosine-3'-phosphate
  modified_base 13: mod_base = OTHER; note = 2'-O-methylcytidine-3'-phosphate
  modified_base 14: mod_base = OTHER; note = 2'-fluoroadenosine-3'-phosphate
  modified_base 15: mod_base = OTHER; note = 2'-O-methylguanosine-3'-phosphate
  modified_base 16: mod_base = OTHER; note = 2'-fluoroguanosine-3'-phosphate
  modified_base 17: mod_base = OTHER; note = 2'-O-methyluridine-3'-phosphate
  modified_base 18: mod_base = OTHER; note = 2'-fluorocytidine-3'-phosphate
  modified_base 19: mod_base = OTHER; note = 2'-O-methyluridine-3'-phosphate
  modified_base 20: mod_base = OTHER; note = 2'-fluoroadenosine-3'-phosphate
  modified_base 21: mod_base = OTHER; note = 2'-O-methylguanosine-3'-phosphorothioate
  modified_base 22: mod_base = OTHER; note = 2'-fluoroadenosine-3'-phosphorothioate
  modified_base 23: mod_base = OTHER; note = 2'-O-methyladenosine-3'-phosphate
acaaaagcaaaacaggtctagaa

SEQ ID NO: 539 - RNA, 21 nt, synthetic construct
  source 1..21: mol_type = other RNA; note = Description of Artificial Sequence: Synthetic oligonucleotide
  modified_base 1: mod_base = OTHER; note = 2'-fluorocytidine-3'-phosphate
  modified_base 2: mod_base = OTHER; note = 2'-O-methyluridine-3'-phosphate
  modified_base 3: mod_base = OTHER; note = 2'-fluoroadenosine-3'-phosphate
  modified_base 4: mod_base = OTHER; note = 2'-O-methylguanosine-3'-phosphate
  modified_base 5: mod_base = OTHER; note = 2'-fluoroadenosine-3'-phosphate
  modified_base 6: mod_base = OTHER; note = 2'-O-methylcytidine-3'-phosphate
  modified_base 7: mod_base = OTHER; note = 2'-fluorocytidine-3'-phosphate
  modified_base 8: mod_base = OTHER; note = 2'-O-methyluridine-3'-phosphate
  modified_base 9: mod_base = OTHER; note = 2'-fluoroguanosine-3'-phosphate
  modified_base 10: mod_base = OTHER; note = 2'-fluorouridine-3'-phosphate
  modified_base 11: mod_base = OTHER; note = 2'-fluorouridine-3'-phosphate
  modified_base 12: mod_base = OTHER; note = 2'-O-methyluridine-3'-phosphate
  modified_base 13: mod_base = OTHER; note = 2'-fluorouridine-3'-phosphate
  modified_base 14: mod_base = OTHER; note = 2'-O-methylguanosine-3'-phosphate
  modified_base 15: mod_base = OTHER; note = 2'-fluorocytidine-3'-phosphate
  modified_base 16: mod_base = OTHER; note = 2'-fluorouridine-3'-phosphate
  modified_base 17: mod_base = OTHER; note = 2'-fluorouridine-3'-phosphate
  modified_base 18: mod_base = OTHER; note = 2'-O-methyluridine-3'-phosphate
  modified_base 19: mod_base = OTHER; note = 2'-fluorouridine-3'-phosphate
  modified_base 20: mod_base = OTHER; note = 2'-O-methylguanosine-3'-phosphate
  modified_base 21: mod_base = OTHER; note = 2'-fluorouridine-3'-phosphate N-[tris(GalNAc-alkyl)-amidodecanoyl)]-4-hydroxyprolinol Hyp-(GalNAc-alkyl)3
ctagacctgttttgcttttgt

SEQ ID NO: 540 - RNA, 23 nt, synthetic construct
  source 1..23: mol_type = other RNA; note = Description of Artificial Sequence: Synthetic oligonucleotide
  modified_base 1: mod_base = OTHER; note = 2'-O-methyladenosine-3'-phosphate
  modified_base 2: mod_base = OTHER; note = 2'-fluorocytidine-3'-phosphate
  modified_base 3: mod_base = OTHER; note = 2'-O-methyladenosine-3'-phosphate
  modified_base 4: mod_base = OTHER; note = 2'-fluoroadenosine-3'-phosphate
  modified_base 5: mod_base = OTHER; note = 2'-O-methyladenosine-3'-phosphate
  modified_base 6: mod_base = OTHER; note = 2'-O-methyladenosine-3'-phosphate
  modified_base 7: mod_base = OTHER; note = 2'-O-methylguanosine-3'-phosphate
  modified_base 8: mod_base = OTHER; note = 2'-fluorocytidine-3'-phosphate
  modified_base 9: mod_base = OTHER; note = 2'-O-methyladenosine-3'-phosphate
  modified_base 10: mod_base = OTHER; note = 2'-fluoroadenosine-3'-phosphate
  modified_base 11: mod_base = OTHER; note = 2'-O-methyladenosine-3'-phosphate
  modified_base 12: mod_base = OTHER; note = 2'-O-methyladenosine-3'-phosphate
  modified_base 13: mod_base = OTHER; note = 2'-O-methylcytidine-3'-phosphate
  modified_base 14: mod_base = OTHER; note = 2'-fluoroadenosine-3'-phosphate
  modified_base 15: mod_base = OTHER; note = 2'-O-methylguanosine-3'-phosphate
  modified_base 16: mod_base = OTHER; note = 2'-fluoroguanosine-3'-phosphate
  modified_base 17: mod_base = OTHER; note = 2'-O-methyluridine-3'-phosphate
  modified_base 18: mod_base = OTHER; note = 2'-fluorocytidine-3'-phosphate
  modified_base 19: mod_base = OTHER; note = 2'-O-methyluridine-3'-phosphate
  modified_base 20: mod_base = OTHER; note = 2'-fluoroadenosine-3'-phosphate
  modified_base 21: mod_base = OTHER; note = 2'-O-methylguanosine-3'-phosphorothioate
  modified_base 22: mod_base = OTHER; note = 2'-fluoroadenosine-3'-phosphorothioate
  modified_base 23: mod_base = OTHER; note = 2'-O-methyladenosine-3'-phosphate
acaaaagcaaaacaggtctagaa

SEQ ID NO: 541 - RNA, 21 nt, synthetic construct
  source 1..21: mol_type = other RNA; note = Description of Artificial Sequence: Synthetic oligonucleotide
  modified_base 1: mod_base = OTHER; note = 2'-fluorocytidine-3'-phosphate
  modified_base 2: mod_base = OTHER; note = 2'-O-methyluridine-3'-phosphate
  modified_base 3: mod_base = OTHER; note = 2'-fluoroadenosine-3'-phosphate
  modified_base 4: mod_base = OTHER; note = 2'-O-methylguanosine-3'-phosphate
  modified_base 5: mod_base = OTHER; note = 2'-fluoroadenosine-3'-phosphate
  modified_base 6: mod_base = OTHER; note = 2'-O-methylcytidine-3'-phosphate
  modified_base 7: mod_base = OTHER; note = 2'-fluorocytidine-3'-phosphate
  modified_base 8: mod_base = OTHER; note = 2'-O-methyluridine-3'-phosphate
  modified_base 9: mod_base = OTHER; note = 2'-fluoroguanosine-3'-phosphate
  modified_base 10: mod_base = OTHER; note = 2'-fluorouridine-3'-phosphate
  modified_base 11: mod_base = OTHER; note = 2'-fluorouridine-3'-phosphate
  modified_base 12: mod_base = OTHER; note = 2'-O-methyluridine-3'-phosphate
  modified_base 13: mod_base = OTHER; note = 2'-fluorouridine-3'-phosphate
  modified_base 14: mod_base = OTHER; note = 2'-fluoroguanosine-3'-phosphate
  modified_base 15: mod_base = OTHER; note = 2'-fluorocytidine-3'-phosphate
  modified_base 16: mod_base = OTHER; note = 2'-O-methyluridine-3'-phosphate
  modified_base 17: mod_base = OTHER; note = 2'-fluorouridine-3'-phosphate
  modified_base 18: mod_base = OTHER; note = 2'-O-methyluridine-3'-phosphate
  modified_base 19: mod_base = OTHER; note = 2'-fluorouridine-3'-phosphate
  modified_base 20: mod_base = OTHER; note = 2'-O-methylguanosine-3'-phosphate
  modified_base 21: mod_base = OTHER; note = 2'-fluorouridine-3'-phosphate N-[tris(GalNAc-alkyl)-amidodecanoyl)]-4-hydroxyprolinol Hyp-(GalNAc-alkyl)3
ctagacctgttttgcttttgt

SEQ ID NO: 542 - RNA, 23 nt, synthetic construct
  source 1..23: mol_type = other RNA; note = Description of Artificial Sequence: Synthetic oligonucleotide
  modified_base 1: mod_base = OTHER; note = 2'-O-methyladenosine-3'-phosphate
  modified_base 2: mod_base = OTHER; note = 2'-fluorocytidine-3'-phosphate
  modified_base 3: mod_base = OTHER; note = 2'-O-methyladenosine-3'-phosphate
  modified_base 4: mod_base = OTHER; note = 2'-fluoroadenosine-3'-phosphate
  modified_base 5: mod_base = OTHER; note = 2'-O-methyladenosine-3'-phosphate
  modified_base 6: mod_base = OTHER; note = 2'-fluoroadenosine-3'-phosphate
  modified_base 7: mod_base = OTHER; note = 2'-O-methylguanosine-3'-phosphate
  modified_base 8: mod_base = OTHER; note = 2'-O-methylcytidine-3'-phosphate
  modified_base 9: mod_base = OTHER; note = 2'-O-methyladenosine-3'-phosphate
  modified_base 10: mod_base = OTHER; note = 2'-fluoroadenosine-3'-phosphate
  modified_base 11: mod_base = OTHER; note = 2'-O-methyladenosine-3'-phosphate
  modified_base 12: mod_base = OTHER; note = 2'-O-methyladenosine-3'-phosphate
  modified_base 13: mod_base = OTHER; note = 2'-O-methylcytidine-3'-phosphate
  modified_base 14: mod_base = OTHER; note = 2'-fluoroadenosine-3'-phosphate
  modified_base 15: mod_base = OTHER; note = 2'-O-methylguanosine-3'-phosphate
  modified_base 16: mod_base = OTHER; note = 2'-fluoroguanosine-3'-phosphate
  modified_base 17: mod_base = OTHER; note = 2'-O-methyluridine-3'-phosphate
  modified_base 18: mod_base = OTHER; note = 2'-fluorocytidine-3'-phosphate
  modified_base 19: mod_base = OTHER; note = 2'-O-methyluridine-3'-phosphate
  modified_base 20: mod_base = OTHER; note = 2'-fluoroadenosine-3'-phosphate
  modified_base 21: mod_base = OTHER; note = 2'-O-methylguanosine-3'-phosphorothioate
  modified_base 22: mod_base = OTHER; note = 2'-fluoroadenosine-3'-phosphorothioate
  modified_base 23: mod_base = OTHER; note = 2'-O-methyladenosine-3'-phosphate
acaaaagcaaaacaggtctagaa

SEQ ID NO: 543 - RNA, 21 nt, synthetic construct
  source 1..21: mol_type = other RNA; note = Description of Artificial Sequence: Synthetic oligonucleotide
  modified_base 1: mod_base = OTHER; note = 2'-fluorocytidine-3'-phosphate
  modified_base 2: mod_base = OTHER; note = 2'-O-methyluridine-3'-phosphate
  modified_base 3: mod_base = OTHER; note = 2'-fluoroadenosine-3'-phosphate
  modified_base 4: mod_base = OTHER; note = 2'-O-methylguanosine-3'-phosphate
  modified_base 5: mod_base = OTHER; note = 2'-fluoroadenosine-3'-phosphate
  modified_base 6: mod_base = OTHER; note = 2'-O-methylcytidine-3'-phosphate
  modified_base 7: mod_base = OTHER; note = 2'-fluorocytidine-3'-phosphate
  modified_base 8: mod_base = OTHER; note = 2'-fluorouridine-3'-phosphate
  modified_base 9: mod_base = OTHER; note = 2'-fluoroguanosine-3'-phosphate
  modified_base 10: mod_base = OTHER; note = 2'-fluorouridine-3'-phosphate
  modified_base 11: mod_base = OTHER; note = 2'-fluorouridine-3'-phosphate
  modified_base 12: mod_base = OTHER; note = 2'-O-methyluridine-3'-phosphate
  modified_base 13: mod_base = OTHER; note = 2'-fluorouridine-3'-phosphate
  modified_base 14: mod_base = OTHER; note = 2'-O-methylguanosine-3'-phosphate
  modified_base 15: mod_base = OTHER; note = 2'-fluorocytidine-3'-phosphate
  modified_base 16: mod_base = OTHER; note = 2'-O-methyluridine-3'-phosphate
  modified_base 17: mod_base = OTHER; note = 2'-fluorouridine-3'-phosphate
  modified_base 18: mod_base = OTHER; note = 2'-O-methyluridine-3'-phosphate
  modified_base 19: mod_base = OTHER; note = 2'-fluorouridine-3'-phosphate
  modified_base 20: mod_base = OTHER; note = 2'-O-methylguanosine-3'-phosphate
  modified_base 21: mod_base = OTHER; note = 2'-fluorouridine-3'-phosphate N-[tris(GalNAc-alkyl)-amidodecanoyl)]-4-hydroxyprolinol Hyp-(GalNAc-alkyl)3
ctagacctgttttgcttttgt

SEQ ID NO: 544 - RNA, 23 nt, synthetic construct
  source 1..23: mol_type = other RNA; note = Description of Artificial Sequence: Synthetic oligonucleotide
  modified_base 1: mod_base = OTHER; note = 2'-O-methyladenosine-3'-phosphate
  modified_base 2: mod_base = OTHER; note = 2'-fluorocytidine-3'-phosphate
  modified_base 3: mod_base = OTHER; note = 2'-O-methyladenosine-3'-phosphate
  modified_base 4: mod_base = OTHER; note = 2'-fluoroadenosine-3'-phosphate
  modified_base 5: mod_base = OTHER; note = 2'-O-methyladenosine-3'-phosphate
  modified_base 6: mod_base = OTHER; note = 2'-fluoroadenosine-3'-phosphate
  modified_base 7: mod_base = OTHER; note = 2'-O-methylguanosine-3'-phosphate
  modified_base 8: mod_base = OTHER; note = 2'-fluorocytidine-3'-phosphate
  modified_base 9: mod_base = OTHER; note = 2'-O-methyladenosine-3'-phosphate
  modified_base 10: mod_base = OTHER; note = 2'-fluoroadenosine-3'-phosphate
  modified_base 11: mod_base = OTHER; note = 2'-O-methyladenosine-3'-phosphate
  modified_base 12: mod_base = OTHER; note = 2'-O-methyladenosine-3'-phosphate
  modified_base 13: mod_base = OTHER; note = 2'-O-methylcytidine-3'-phosphate
  modified_base 14: mod_base = OTHER; note = 2'-O-methyladenosine-3'-phosphate
  modified_base 15: mod_base = OTHER; note = 2'-O-methylguanosine-3'-phosphate
  modified_base 16: mod_base = OTHER; note = 2'-fluoroguanosine-3'-phosphate
  modified_base 17: mod_base = OTHER; note = 2'-O-methyluridine-3'-phosphate
  modified_base 18: mod_base = OTHER; note = 2'-fluorocytidine-3'-phosphate
  modified_base 19: mod_base = OTHER; note = 2'-O-methyluridine-3'-phosphate
  modified_base 20: mod_base = OTHER; note = 2'-fluoroadenosine-3'-phosphate
  modified_base 21: mod_base = OTHER; note = 2'-O-methylguanosine-3'-phosphorothioate
  modified_base 22: mod_base = OTHER; note = 2'-fluoroadenosine-3'-phosphorothioate
  modified_base 23: mod_base = OTHER; note = 2'-O-methyladenosine-3'-phosphate
acaaaagcaaaacaggtctagaa

SEQ ID NO: 545 - RNA, 21 nt, synthetic construct
  source 1..21: mol_type = other RNA; note = Description of Artificial Sequence: Synthetic oligonucleotide
  modified_base 1: mod_base = OTHER; note = 2'-fluorocytidine-3'-phosphate
  modified_base 2: mod_base = OTHER; note = 2'-O-methyluridine-3'-phosphate
  modified_base 3: mod_base = OTHER; note = 2'-fluoroadenosine-3'-phosphate
  modified_base 4: mod_base = OTHER; note = 2'-O-methylguanosine-3'-phosphate
  modified_base 5: mod_base = OTHER; note = 2'-fluoroadenosine-3'-phosphate
  modified_base 6: mod_base = OTHER; note = 2'-fluorocytidine-3'-phosphate
  modified_base 7: mod_base = OTHER; note = 2'-fluorocytidine-3'-phosphate
  modified_base 8: mod_base = OTHER; note = 2'-O-methyluridine-3'-phosphate
  modified_base 9: mod_base = OTHER; note = 2'-fluoroguanosine-3'-phosphate
  modified_base 10: mod_base = OTHER; note = 2'-fluorouridine-3'-phosphate
  modified_base 11: mod_base = OTHER; note = 2'-fluorouridine-3'-phosphate
  modified_base 12: mod_base = OTHER; note = 2'-O-methyluridine-3'-phosphate
  modified_base 13: mod_base = OTHER; note = 2'-fluorouridine-3'-phosphate
  modified_base 14: mod_base = OTHER; note = 2'-O-methylguanosine-3'-phosphate
  modified_base 15: mod_base = OTHER; note = 2'-fluorocytidine-3'-phosphate
  modified_base 16: mod_base = OTHER; note = 2'-O-methyluridine-3'-phosphate
  modified_base 17: mod_base = OTHER; note = 2'-fluorouridine-3'-phosphate
  modified_base 18: mod_base = OTHER; note = 2'-O-methyluridine-3'-phosphate
  modified_base 19: mod_base = OTHER; note = 2'-fluorouridine-3'-phosphate
  modified_base 20: mod_base = OTHER; note = 2'-O-methylguanosine-3'-phosphate
  modified_base 21: mod_base = OTHER; note = 2'-fluorouridine-3'-phosphate N-[tris(GalNAc-alkyl)-amidodecanoyl)]-4-hydroxyprolinol Hyp-(GalNAc-alkyl)3
ctagacctgttttgcttttgt

SEQ ID NO: 546 - RNA, 23 nt, synthetic construct
  source 1..23: mol_type = other RNA; note = Description of Artificial Sequence: Synthetic oligonucleotide
  modified_base 1: mod_base = OTHER; note = 2'-O-methyladenosine-3'-phosphate
  modified_base 2: mod_base = OTHER; note = 2'-fluorocytidine-3'-phosphate
  modified_base 3: mod_base = OTHER; note = 2'-O-methyladenosine-3'-phosphate
  modified_base 4: mod_base = OTHER; note = 2'-fluoroadenosine-3'-phosphate
  modified_base 5: mod_base = OTHER; note = 2'-O-methyladenosine-3'-phosphate
  modified_base 6: mod_base = OTHER; note = 2'-fluoroadenosine-3'-phosphate
  modified_base 7: mod_base = OTHER; note = 2'-O-methylguanosine-3'-phosphate
  modified_base 8: mod_base = OTHER; note = 2'-fluorocytidine-3'-phosphate
  modified_base 9: mod_base = OTHER; note = 2'-O-methyladenosine-3'-phosphate
  modified_base 10: mod_base = OTHER; note = 2'-fluoroadenosine-3'-phosphate
  modified_base 11: mod_base = OTHER; note = 2'-O-methyladenosine-3'-phosphate
  modified_base 12: mod_base = OTHER; note = 2'-O-methyladenosine-3'-phosphate
  modified_base 13: mod_base = OTHER; note = 2'-O-methylcytidine-3'-phosphate
  modified_base 14: mod_base = OTHER; note = 2'-fluoroadenosine-3'-phosphate
  modified_base 15: mod_base = OTHER; note = 2'-O-methylguanosine-3'-phosphate
  modified_base 16: mod_base = OTHER; note = 2'-O-methylguanosine-3'-phosphate
  modified_base 17: mod_base = OTHER; note = 2'-O-methyluridine-3'-phosphate
  modified_base 18: mod_base = OTHER; note = 2'-fluorocytidine-3'-phosphate
  modified_base 19: mod_base = OTHER; note = 2'-O-methyluridine-3'-phosphate
  modified_base 20: mod_base = OTHER; note = 2'-fluoroadenosine-3'-phosphate
  modified_base 21: mod_base = OTHER; note = 2'-O-methylguanosine-3'-phosphorothioate
  modified_base 22: mod_base = OTHER; note = 2'-fluoroadenosine-3'-phosphorothioate
  modified_base 23: mod_base = OTHER; note = 2'-O-methyladenosine-3'-phosphate
acaaaagcaaaacaggtctagaa

SEQ ID NO: 547 - RNA, 21 nt, synthetic construct
  source 1..21: mol_type = other RNA; note = Description of Artificial Sequence: Synthetic oligonucleotide
  modified_base 1: mod_base = OTHER; note = 2'-fluorocytidine-3'-phosphate
  modified_base 2: mod_base = OTHER; note = 2'-O-methyluridine-3'-phosphate
  modified_base 3: mod_base = OTHER; note = 2'-fluoroadenosine-3'-phosphate
  modified_base 4: mod_base = OTHER; note = 2'-fluoroguanosine-3'-phosphate
  modified_base 5: mod_base = OTHER; note = 2'-fluoroadenosine-3'-phosphate
  modified_base 6: mod_base = OTHER; note = 2'-O-methylcytidine-3'-phosphate
  modified_base 7: mod_base = OTHER; note = 2'-fluorocytidine-3'-phosphate
  modified_base 8: mod_base = OTHER; note = 2'-O-methyluridine-3'-phosphate
  modified_base 9: mod_base = OTHER; note = 2'-fluoroguanosine-3'-phosphate
  modified_base 10: mod_base = OTHER; note = 2'-fluorouridine-3'-phosphate
  modified_base 11: mod_base = OTHER; note = 2'-fluorouridine-3'-phosphate
  modified_base 12: mod_base = OTHER; note = 2'-O-methyluridine-3'-phosphate
  modified_base 13: mod_base = OTHER; note = 2'-fluorouridine-3'-phosphate
  modified_base 14: mod_base = OTHER; note = 2'-O-methylguanosine-3'-phosphate
  modified_base 15: mod_base = OTHER; note = 2'-fluorocytidine-3'-phosphate
  modified_base 16: mod_base = OTHER; note = 2'-O-methyluridine-3'-phosphate
  modified_base 17: mod_base = OTHER; note = 2'-fluorouridine-3'-phosphate
  modified_base 18: mod_base = OTHER; note = 2'-O-methyluridine-3'-phosphate
  modified_base 19: mod_base = OTHER; note = 2'-fluorouridine-3'-phosphate
  modified_base 20: mod_base = OTHER; note = 2'-O-methylguanosine-3'-phosphate
  modified_base 21: mod_base = OTHER; note = 2'-fluorouridine-3'-phosphate N-[tris(GalNAc-alkyl)-amidodecanoyl)]-4-hydroxyprolinol Hyp-(GalNAc-alkyl)3
ctagacctgttttgcttttgt

SEQ ID NO: 548 - RNA, 23 nt, synthetic construct
  source 1..23: mol_type = other RNA; note = Description of Artificial Sequence: Synthetic oligonucleotide
  modified_base 1: mod_base = OTHER; note = 2'-O-methyladenosine-3'-phosphate
  modified_base 2: mod_base = OTHER; note = 2'-fluorocytidine-3'-phosphate
  modified_base 3: mod_base = OTHER; note = 2'-O-methyladenosine-3'-phosphate
  modified_base 4: mod_base = OTHER; note = 2'-fluoroadenosine-3'-phosphate
  modified_base 5: mod_base = OTHER; note = 2'-O-methyladenosine-3'-phosphate
  modified_base 6: mod_base = OTHER; note = 2'-fluoroadenosine-3'-phosphate
  modified_base 7: mod_base = OTHER; note = 2'-O-methylguanosine-3'-phosphate
  modified_base 8: mod_base = OTHER; note = 2'-fluorocytidine-3'-phosphate
  modified_base 9: mod_base = OTHER; note = 2'-O-methyladenosine-3'-phosphate
  modified_base 10: mod_base = OTHER; note = 2'-fluoroadenosine-3'-phosphate
  modified_base 11: mod_base = OTHER; note = 2'-O-methyladenosine-3'-phosphate
  modified_base 12: mod_base = OTHER; note = 2'-O-methyladenosine-3'-phosphate
  modified_base 13: mod_base = OTHER; note = 2'-O-methylcytidine-3'-phosphate
  modified_base 14: mod_base = OTHER; note = 2'-fluoroadenosine-3'-phosphate
  modified_base 15: mod_base = OTHER; note = 2'-O-methylguanosine-3'-phosphate
  modified_base 16: mod_base = OTHER; note = 2'-fluoroguanosine-3'-phosphate
  modified_base 17: mod_base = OTHER; note = 2'-O-methyluridine-3'-phosphate
  modified_base 18: mod_base = OTHER; note = 2'-O-methylcytidine-3'-phosphate
  modified_base 19: mod_base = OTHER; note = 2'-O-methyluridine-3'-phosphate
  modified_base 20: mod_base = OTHER; note = 2'-fluoroadenosine-3'-phosphate
  modified_base 21: mod_base = OTHER; note = 2'-O-methylguanosine-3'-phosphorothioate
  modified_base 22: mod_base = OTHER; note = 2'-fluoroadenosine-3'-phosphorothioate
  modified_base 23: mod_base = OTHER; note = 2'-O-methyladenosine-3'-phosphate
acaaaagcaaaacaggtctagaa

SEQ ID NO: 549 - RNA, 21 nt, synthetic construct
  source 1..21: mol_type = other RNA; note = Description of Artificial Sequence: Synthetic oligonucleotide
  modified_base 1: mod_base = OTHER; note = 2'-fluorocytidine-3'-phosphate
  modified_base 2: mod_base = OTHER; note = 2'-fluorouridine-3'-phosphate
  modified_base 3: mod_base = OTHER; note = 2'-fluoroadenosine-3'-phosphate
  modified_base 4: mod_base = OTHER; note = 2'-O-methylguanosine-3'-phosphate
  modified_base 5: mod_base = OTHER; note = 2'-fluoroadenosine-3'-phosphate
  modified_base 6: mod_base = OTHER; note = 2'-O-methylcytidine-3'-phosphate
  modified_base 7: mod_base = OTHER; note = 2'-fluorocytidine-3'-phosphate
  modified_base 8: mod_base = OTHER; note = 2'-O-methyluridine-3'-phosphate
  modified_base 9: mod_base = OTHER; note = 2'-fluoroguanosine-3'-phosphate
  modified_base 10: mod_base = OTHER; note = 2'-fluorouridine-3'-phosphate
  modified_base 11: mod_base = OTHER; note = 2'-fluorouridine-3'-phosphate
  modified_base 12: mod_base = OTHER; note = 2'-O-methyluridine-3'-phosphate
  modified_base 13: mod_base = OTHER; note = 2'-fluorouridine-3'-phosphate
  modified_base 14: mod_base = OTHER; note = 2'-O-methylguanosine-3'-phosphate
  modified_base 15: mod_base = OTHER; note = 2'-fluorocytidine-3'-phosphate
  modified_base 16: mod_base = OTHER; note = 2'-O-methyluridine-3'-phosphate
  modified_base 17: mod_base = OTHER; note = 2'-fluorouridine-3'-phosphate
  modified_base 18: mod_base = OTHER; note = 2'-O-methyluridine-3'-phosphate
  modified_base 19: mod_base = OTHER; note = 2'-fluorouridine-3'-phosphate
  modified_base 20: mod_base = OTHER; note = 2'-O-methylguanosine-3'-phosphate
  modified_base 21: mod_base = OTHER; note = 2'-fluorouridine-3'-phosphate N-[tris(GalNAc-alkyl)-amidodecanoyl)]-4-hydroxyprolinol Hyp-(GalNAc-alkyl)3
ctagacctgttttgcttttgt

SEQ ID NO: 550 - RNA, 23 nt, synthetic construct
  source 1..23: mol_type = other RNA; note = Description of Artificial Sequence: Synthetic oligonucleotide
  modified_base 1: mod_base = OTHER; note = 2'-O-methyladenosine-3'-phosphate
  modified_base 2: mod_base = OTHER; note = 2'-fluorocytidine-3'-phosphate
  modified_base 3: mod_base = OTHER; note = 2'-O-methyladenosine-3'-phosphate
  modified_base 4: mod_base = OTHER; note = 2'-fluoroadenosine-3'-phosphate
  modified_base 5: mod_base = OTHER; note = 2'-O-methyladenosine-3'-phosphate
  modified_base 6: mod_base = OTHER; note = 2'-fluoroadenosine-3'-phosphate
  modified_base 7: mod_base = OTHER; note = 2'-O-methylguanosine-3'-phosphate
  modified_base 8: mod_base = OTHER; note = 2'-fluorocytidine-3'-phosphate
  modified_base 9: mod_base = OTHER; note = 2'-O-methyladenosine-3'-phosphate
  modified_base 10: mod_base = OTHER; note = 2'-fluoroadenosine-3'-phosphate
  modified_base 11: mod_base = OTHER; note = 2'-O-methyladenosine-3'-phosphate
  modified_base 12: mod_base = OTHER; note = 2'-O-methyladenosine-3'-phosphate
  modified_base 13: mod_base = OTHER; note = 2'-O-methylcytidine-3'-phosphate
  modified_base 14: mod_base = OTHER; note = 2'-fluoroadenosine-3'-phosphate
  modified_base 15: mod_base = OTHER; note = 2'-O-methylguanosine-3'-phosphate
  modified_base 16: mod_base = OTHER; note = 2'-fluoroguanosine-3'-phosphate
  modified_base 17: mod_base = OTHER; note = 2'-O-methyluridine-3'-phosphate
  modified_base 18: mod_base = OTHER; note = 2'-fluorocytidine-3'-phosphate
  modified_base 19: mod_base = OTHER; note = 2'-O-methyluridine-3'-phosphate
  modified_base 20: mod_base = OTHER; note = 2'-O-methyladenosine-3'-phosphate
  modified_base 21: mod_base = OTHER; note = 2'-O-methylguanosine-3'-phosphorothioate
  modified_base 22: mod_base = OTHER; note = 2'-fluoroadenosine-3'-phosphorothioate
  modified_base 23: mod_base = OTHER; note = 2'-O-methyladenosine-3'-phosphate
acaaaagcaaaacaggtctagaa

SEQ ID NO: 551 - RNA, 21 nt, synthetic construct
  source 1..21: mol_type = other RNA; note = Description of Artificial Sequence: Synthetic oligonucleotide
  modified_base 1: mod_base = OTHER; note = 2'-fluorocytidine-3'-phosphate
  modified_base 2: mod_base = OTHER; note = 2'-O-methyluridine-3'-phosphate
  modified_base 3: mod_base = OTHER; note = 2'-fluoroadenosine-3'-phosphate
  modified_base 4: mod_base = OTHER; note = 2'-O-methylguanosine-3'-phosphate
  modified_base 5: mod_base = OTHER; note = 2'-fluoroadenosine-3'-phosphate
  modified_base 6: mod_base = OTHER; note = 2'-O-methylcytidine-3'-phosphate
  modified_base 7: mod_base = OTHER; note = 2'-fluorocytidine-3'-phosphate
  modified_base 8: mod_base = OTHER; note = 2'-O-methyluridine-3'-phosphate
  modified_base 9: mod_base = OTHER; note = 2'-fluoroguanosine-3'-phosphate
  modified_base 10: mod_base = OTHER; note = 2'-fluorouridine-3'-phosphate
  modified_base 11: mod_base = OTHER; note = 2'-fluorouridine-3'-phosphate
  modified_base 12: mod_base = OTHER; note = 2'-O-methyluridine-3'-phosphate
  modified_base 13: mod_base = OTHER; note = 2'-fluorouridine-3'-phosphate
  modified_base 14: mod_base = OTHER; note = 2'-O-methylguanosine-3'-phosphate
  modified_base 15: mod_base = OTHER; note = 2'-fluorocytidine-3'-phosphate
  modified_base 16: mod_base = OTHER; note = 2'-O-methyluridine-3'-phosphate
  modified_base 17: mod_base = OTHER; note = 2'-fluorouridine-3'-phosphate
  modified_base 18: mod_base = OTHER; note = 2'-O-methyluridine-3'-phosphate
  modified_base 19: mod_base = OTHER; note = 2'-fluorouridine-3'-phosphate
  modified_base 20: mod_base = OTHER; note = 2'-O-methylguanosine-3'-phosphate
  modified_base 21: mod_base = OTHER; note = 2'-fluorouridine-3'-phosphate N-[tris(GalNAc-alkyl)-amidodecanoyl)]-4-hydroxyprolinol Hyp-(GalNAc-alkyl)3
ctagacctgttttgcttttgt

SEQ ID NO: 552 - RNA, 23 nt, synthetic construct
  source 1..23: mol_type = other RNA; note = Description of Artificial Sequence: Synthetic oligonucleotide
  modified_base 1: mod_base = OTHER; note = 2'-O-methyladenosine-3'-phosphate
  modified_base 2: mod_base = OTHER; note = 2'-fluorocytidine-3'-phosphate
  modified_base 3: mod_base = OTHER; note = 2'-O-methyladenosine-3'-phosphate
  modified_base 4: mod_base = OTHER; note = 2'-fluoroadenosine-3'-phosphate
  modified_base 5: mod_base = OTHER; note = 2'-O-methyladenosine-3'-phosphate
  modified_base 6: mod_base = OTHER; note = 2'-fluoroadenosine-3'-phosphate
  modified_base 7: mod_base = OTHER; note = 2'-O-methylguanosine-3'-phosphate
  modified_base 8: mod_base = OTHER; note = 2'-fluorocytidine-3'-phosphate
  modified_base 9: mod_base = OTHER; note = 2'-O-methyladenosine-3'-phosphate
  modified_base 10: mod_base = OTHER; note = 2'-fluoroadenosine-3'-phosphate
  modified_base 11: mod_base = OTHER; note = 2'-O-methyladenosine-3'-phosphate
  modified_base 12: mod_base = OTHER; note = 2'-O-methyladenosine-3'-phosphate
  modified_base 13: mod_base = OTHER; note = 2'-O-methylcytidine-3'-phosphate
  modified_base 14: mod_base = OTHER; note = 2'-fluoroadenosine-3'-phosphate
  modified_base 15: mod_base = OTHER; note = 2'-O-methylguanosine-3'-phosphate
  modified_base 16: mod_base = OTHER; note = 2'-fluoroguanosine-3'-phosphate
  modified_base 17: mod_base = OTHER; note = 2'-O-methyluridine-3'-phosphate
  modified_base 18: mod_base = OTHER; note = 2'-fluorocytidine-3'-phosphate
  modified_base 19: mod_base = OTHER; note = 2'-O-methyluridine-3'-phosphate
  modified_base 20: mod_base = OTHER; note = 2'-fluoroadenosine-3'-phosphate
  modified_base 21: mod_base = OTHER; note = 2'-O-methylguanosine-3'-phosphorothioate
  modified_base 22: mod_base = OTHER; note = 2'-O-methyladenosine-3'-phosphorothioate
  modified_base 23: mod_base = OTHER; note = 2'-O-methyladenosine-3'-phosphate
acaaaagcaaaacaggtctagaa

SEQ ID NO: 553 - RNA, 19 nt, synthetic construct
  source 1..19: mol_type = other RNA; note = Description of Artificial Sequence: Synthetic oligonucleotide
  modified_base 1: mod_base = OTHER; note = adenosine-3'-phosphorothioate
  modified_base 2: mod_base = OTHER; note = guanosine-3'-phosphorothioate
  modified_base 4: mod_base = OTHER; note = 2'-O-methylcytidine-3'-phosphate
  modified_base 5: mod_base = OTHER; note = 2'-O-methylcytidine-3'-phosphate
  modified_base 6: mod_base = OTHER; note = 2'-O-methyluridine-3'-phosphate
  modified_base 8: mod_base = OTHER; note = 2'-O-methyluridine-3'-phosphate
  modified_base 9: mod_base = OTHER; note = 2'-O-methyluridine-3'-phosphate
  modified_base 10: mod_base = OTHER; note = 2'-O-methyluridine-3'-phosphate
  modified_base 11: mod_base = OTHER; note = 2'-O-methyluridine-3'-phosphate
  modified_base 13: mod_base = OTHER; note = 2'-O-methylcytidine-3'-phosphate
  modified_base 14: mod_base = OTHER; note = 2'-O-methyluridine-3'-phosphate
  modified_base 15: mod_base = OTHER; note = 2'-O-methyluridine-3'-phosphate
  modified_base 16: mod_base = OTHER; note = 2'-O-methyluridine-3'-phosphate
  modified_base 17: mod_base = OTHER; note = 2'-O-methyluridine-3'-phosphate
  modified_base 19: mod_base = OTHER; note = 2'-O-methyluridine-3'-phosphate N-[tris(GalNAc-alkyl)-amidodecanoyl)]-4-hydroxyprolinol Hyp-(GalNAc-alkyl)3
agacctgttttgcttttgt

SEQ ID NO: 554 - RNA, 21 nt, synthetic construct
  source 1..21: mol_type = other RNA; note = Description of Artificial Sequence: Synthetic oligonucleotide
  modified_base 1: mod_base = OTHER; note = adenosine-3'-phosphorothioate
  modified_base 2: mod_base = OTHER; note = 2'-O-methylcytidine-3'-phosphorothioate
  modified_base 8: mod_base = OTHER; note = 2'-O-methylcytidine-3'-phosphate
  modified_base 13: mod_base = OTHER; note = 2'-O-methylcytidine-3'-phosphate
  modified_base 17: mod_base = OTHER; note = 2'-O-methyluridine-3'-phosphate
  modified_base 18: mod_base = OTHER; note = 2'-O-methylcytidine-3'-phosphate
  modified_base 19: mod_base = OTHER; note = 2'-O-methyluridine-3'-phosphorothioate
  modified_base 20: mod_base = OTHER; note = adenosine-3'-phosphorothioate
acaaaagcaaaacaggtctag

SEQ ID NO: 555 - RNA, 21 nt, synthetic construct
  source 1..21: mol_type = other RNA; note = Description of Artificial Sequence: Synthetic oligonucleotide
  modified_base 1: mod_base = OTHER; note = 2'-fluorocytidine-3'-phosphorothioate
  modified_base 2: mod_base = OTHER; note = 2'-O-methyluridine-3'-phosphorothioate
  modified_base 3: mod_base = OTHER; note = 2'-fluoroadenosine-3'-phosphate
  modified_base 4: mod_base = OTHER; note = 2'-O-methylguanosine-3'-phosphate
  modified_base 5: mod_base = OTHER; note = 2'-fluoroadenosine-3'-phosphate
  modified_base 6: mod_base = OTHER; note = 2'-O-methylcytidine-3'-phosphate
  modified_base 7: mod_base = OTHER; note = 2'-fluorocytidine-3'-phosphate
  modified_base 8: mod_base = OTHER; note = 2'-O-methyluridine-3'-phosphate
  modified_base 9: mod_base = OTHER; note = 2'-fluoroguanosine-3'-phosphate
  modified_base 10: mod_base = OTHER; note = 2'-fluorouridine-3'-phosphate
  modified_base 11: mod_base = OTHER; note = 2'-fluorouridine-3'-phosphate
  modified_base 12: mod_base = OTHER; note = 2'-O-methyluridine-3'-phosphate
  modified_base 13: mod_base = OTHER; note = 2'-fluorouridine-3'-phosphate
  modified_base 14: mod_base = OTHER; note = 2'-O-methylguanosine-3'-phosphate
  modified_base 15: mod_base = OTHER; note = 2'-fluorocytidine-3'-phosphate
  modified_base 16: mod_base = OTHER; note = 2'-O-methyluridine-3'-phosphate
  modified_base 17: mod_base = OTHER; note = 2'-fluorouridine-3'-phosphate
  modified_base 18: mod_base = OTHER; note = 2'-O-methyluridine-3'-phosphate
  modified_base 19: mod_base = OTHER; note = 2'-fluorouridine-3'-phosphate
  modified_base 20: mod_base = OTHER; note = 2'-O-methylguanosine-3'-phosphate
  modified_base 21: mod_base = OTHER; note = 2'-fluorouridine-3'-phosphate N-[tris(GalNAc-alkyl)-amidodecanoyl)]-4-hydroxyprolinol Hyp-(GalNAc-alkyl)3
ctagacctgttttgcttttgt

SEQ ID NO: 556 - RNA, 21 nt, synthetic construct
  source 1..21: mol_type = other RNA; note = Description of Artificial Sequence: Synthetic oligonucleotide
  modified_base 1: mod_base = OTHER; note = 2'-O-methyladenosine-3'-phosphorothioate
  modified_base 2: mod_base = OTHER; note = 2'-fluorocytidine-3'-phosphorothioate
  modified_base 3: mod_base = OTHER; note = 2'-O-methyladenosine-3'-phosphate
  modified_base 4: mod_base = OTHER; note = 2'-fluoroadenosine-3'-phosphate
  modified_base 5: mod_base = OTHER; note = 2'-O-methyladenosine-3'-phosphate
  modified_base 6: mod_base = OTHER; note = 2'-fluoroadenosine-3'-phosphate
  modified_base 7: mod_base = OTHER; note = 2'-O-methylguanosine-3'-phosphate
  modified_base 8: mod_base = OTHER; note = 2'-fluorocytidine-3'-phosphate
  modified_base 9: mod_base = OTHER; note = 2'-O-methyladenosine-3'-phosphate
  modified_base 10: mod_base = OTHER; note = 2'-fluoroadenosine-3'-phosphate
  modified_base 11: mod_base = OTHER; note = 2'-O-methyladenosine-3'-phosphate
  modified_base 12: mod_base = OTHER; note = 2'-O-methyladenosine-3'-phosphate
  modified_base 13: mod_base = OTHER; note = 2'-O-methylcytidine-3'-phosphate
  modified_base 14: mod_base = OTHER; note = 2'-fluoroadenosine-3'-phosphate
  modified_base 15: mod_base = OTHER; note = 2'-O-methylguanosine-3'-phosphate
  modified_base 16: mod_base = OTHER; note = 2'-fluoroguanosine-3'-phosphate
  modified_base 17: mod_base = OTHER; note = 2'-O-methyluridine-3'-phosphate
  modified_base 18: mod_base = OTHER; note = 2'-fluorocytidine-3'-phosphate
  modified_base 19: mod_base = OTHER; note = 2'-O-methyluridine-3'-phosphorothioate
  modified_base 20: mod_base = OTHER; note = 2'-fluoroadenosine-3'-phosphorothioate
  modified_base 21: mod_base = OTHER; note = 2'-O-methylguanosine-3'-phosphate
acaaaagcaaaacaggtctag

SEQ ID NO: 557 - RNA, 19 nt, synthetic construct
  source 1..19: mol_type = other RNA; note = Description of Artificial Sequence: Synthetic oligonucleotide
  modified_base 1: mod_base = OTHER; note = 2'-fluoroadenosine-3'-phosphorothioate
  modified_base 2: mod_base = OTHER; note = 2'-O-methylguanosine-3'-phosphorothioate
  modified_base 3: mod_base = OTHER; note = 2'-fluoroadenosine-3'-phosphate
  modified_base 4: mod_base = OTHER; note = 2'-O-methylcytidine-3'-phosphate
  modified_base 5: mod_base = OTHER; note = 2'-fluorocytidine-3'-phosphate
  modified_base 6: mod_base = OTHER; note = 2'-O-methyluridine-3'-phosphate
  modified_base 7: mod_base = OTHER; note = 2'-fluoroguanosine-3'-phosphate
  modified_base 8: mod_base = OTHER; note = 2'-fluorouridine-3'-phosphate
  modified_base 9: mod_base = OTHER; note = 2'-fluorouridine-3'-phosphate
  modified_base 10: mod_base = OTHER; note = 2'-O-methyluridine-3'-phosphate
  modified_base 11: mod_base = OTHER; note = 2'-fluorouridine-3'-phosphate
  modified_base 12: mod_base = OTHER; note = 2'-O-methylguanosine-3'-phosphate
  modified_base 13: mod_base = OTHER; note = 2'-fluorocytidine-3'-phosphate
  modified_base 14: mod_base = OTHER; note = 2'-O-methyluridine-3'-phosphate
  modified_base 15: mod_base = OTHER; note = 2'-fluorouridine-3'-phosphate
  modified_base 16: mod_base = OTHER; note = 2'-O-methyluridine-3'-phosphate
  modified_base 17: mod_base = OTHER; note = 2'-fluorouridine-3'-phosphate
  modified_base 18: mod_base = OTHER; note = 2'-O-methylguanosine-3'-phosphate
  modified_base 19: mod_base = OTHER; note = 2'-fluorouridine-3'-phosphate N-[tris(GalNAc-alkyl)-amidodecanoyl)]-4-hydroxyprolinol Hyp-(GalNAc-alkyl)3
agacctgttttgcttttgt

SEQ ID NO: 558 - RNA, 21 nt, synthetic construct
  source 1..21: mol_type = other RNA; note = Description of Artificial Sequence: Synthetic oligonucleotide
  modified_base 1: mod_base = OTHER; note = 2'-O-methyladenosine-3'-phosphorothioate
  modified_base 2: mod_base = OTHER; note = 2'-fluorocytidine-3'-phosphorothioate
  modified_base 3: mod_base = OTHER; note = 2'-O-methyladenosine-3'-phosphate
  modified_base 4: mod_base = OTHER; note = 2'-fluoroadenosine-3'-phosphate
  modified_base 5: mod_base = OTHER; note = 2'-O-methyladenosine-3'-phosphate
  modified_base 6: mod_base = OTHER; note = 2'-fluoroadenosine-3'-phosphate
  modified_base 7: mod_base = OTHER; note = 2'-O-methylguanosine-3'-phosphate
  modified_base 8: mod_base = OTHER; note = 2'-fluorocytidine-3'-phosphate
  modified_base 9: mod_base = OTHER; note = 2'-O-methyladenosine-3'-phosphate
  modified_base 10: mod_base = OTHER; note = 2'-fluoroadenosine-3'-phosphate
  modified_base 11: mod_base = OTHER; note = 2'-O-methyladenosine-3'-phosphate
  modified_base 12: mod_base = OTHER; note = 2'-O-methyladenosine-3'-phosphate
  modified_base 13: mod_base = OTHER; note = 2'-O-methylcytidine-3'-phosphate
  modified_base 14: mod_base = OTHER; note = 2'-fluoroadenosine-3'-phosphate
  modified_base 15: mod_base = OTHER; note = 2'-O-methylguanosine-3'-phosphate
  modified_base 16: mod_base = OTHER; note = 2'-fluoroguanosine-3'-phosphate
  modified_base 17: mod_base = OTHER; note = 2'-O-methyluridine-3'-phosphate
  modified_base 18: mod_base = OTHER; note = 2'-fluorocytidine-3'-phosphate
  modified_base 19: mod_base = OTHER; note = 2'-O-methyluridine-3'-phosphorothioate
  modified_base 20: mod_base = OTHER; note = 2'-O-methyladenosine-3'-phosphorothioate
  modified_base 21: mod_base = OTHER; note = 2'-O-methylguanosine-3'-phosphate
acaaaagcaaaacaggtctag

SEQ ID NO: 559 - RNA, 20 nt, synthetic construct
  source 1..20: mol_type = other RNA; note = Description of Artificial Sequence: Synthetic oligonucleotide
  modified_base 1: mod_base = OTHER; note = 2'-O-methyluridine-3'-phosphorothioate
  modified_base 2: mod_base = OTHER; note = 2'-fluoroadenosine-3'-phosphorothioate
  modified_base 3: mod_base = OTHER; note = 2'-O-methylguanosine-3'-phosphate
  modified_base 4: mod_base = OTHER; note = 2'-fluoroadenosine-3'-phosphate
  modified_base 5: mod_base = OTHER; note = 2'-O-methylcytidine-3'-phosphate
  modified_base 6: mod_base = OTHER; note = 2'-fluorocytidine-3'-phosphate
  modified_base 7: mod_base = OTHER; note = 2'-O-methyluridine-3'-phosphate
  modified_base 8: mod_base = OTHER; note = 2'-fluoroguanosine-3'-phosphate
  modified_base 9: mod_base = OTHER; note = 2'-fluorouridine-3'-phosphate
  modified_base 10: mod_base = OTHER; note = 2'-fluorouridine-3'-phosphate
  modified_base 11: mod_base = OTHER; note = 2'-O-methyluridine-3'-phosphate
  modified_base 12: mod_base = OTHER; note = 2'-fluorouridine-3'-phosphate
  modified_base 13: mod_base = OTHER; note = 2'-O-methylguanosine-3'-phosphate
  modified_base 14: mod_base = OTHER; note = 2'-fluorocytidine-3'-phosphate
  modified_base 15: mod_base = OTHER; note = 2'-O-methyluridine-3'-phosphate
  modified_base 16: mod_base = OTHER; note = 2'-fluorouridine-3'-phosphate
  modified_base 17: mod_base = OTHER; note = 2'-O-methyluridine-3'-phosphate
  modified_base 18: mod_base = OTHER; note = 2'-fluorouridine-3'-phosphate
  modified_base 19: mod_base = OTHER; note = 2'-O-methylguanosine-3'-phosphate
  modified_base 20: mod_base = OTHER; note = 2'-fluorouridine-3'-phosphate N-[tris(GalNAc-alkyl)-amidodecanoyl)]-4-hydroxyprolinol Hyp-(GalNAc-alkyl)3
tagacctgttttgcttttgt

SEQ ID NO: 560 - RNA, 21 nt, synthetic construct
  source 1..21: mol_type = other RNA; note = Description of Artificial Sequence: Synthetic oligonucleotide
  modified_base 1: mod_base = OTHER; note = 2'-O-methyladenosine-3'-phosphorothioate
  modified_base 2: mod_base = OTHER; note = 2'-fluorocytidine-3'-phosphorothioate
  modified_base 3: mod_base = OTHER; note = 2'-O-methyladenosine-3'-phosphate
  modified_base 4: mod_base = OTHER; note = 2'-fluoroadenosine-3'-phosphate
  modified_base 5: mod_base = OTHER; note = 2'-O-methyladenosine-3'-phosphate
  modified_base 6: mod_base = OTHER; note = 2'-fluoroadenosine-3'-phosphate
  modified_base 7: mod_base = OTHER; note = 2'-O-methylguanosine-3'-phosphate
  modified_base 8: mod_base = OTHER; note = 2'-fluorocytidine-3'-phosphate
  modified_base 9: mod_base = OTHER; note = 2'-O-methyladenosine-3'-phosphate
  modified_base 10: mod_base = OTHER; note = 2'-fluoroadenosine-3'-phosphate
  modified_base 11: mod_base = OTHER; note = 2'-O-methyladenosine-3'-phosphate
  modified_base 12: mod_base = OTHER; note = 2'-O-methyladenosine-3'-phosphate
  modified_base 13: mod_base = OTHER; note = 2'-O-methylcytidine-3'-phosphate
  modified_base 14: mod_base = OTHER; note = 2'-fluoroadenosine-3'-phosphate
  modified_base 15: mod_base = OTHER; note = 2'-O-methylguanosine-3'-phosphate
  modified_base 16: mod_base = OTHER; note = 2'-fluoroguanosine-3'-phosphate
  modified_base 17: mod_base = OTHER; note = 2'-O-methyluridine-3'-phosphate
  modified_base 18: mod_base = OTHER; note = 2'-fluorocytidine-3'-phosphate
  modified_base 19: mod_base = OTHER; note = 2'-O-methyluridine-3'-phosphorothioate
  modified_base 20: mod_base = OTHER; note = 2'-O-methyladenosine-3'-phosphorothioate
  modified_base 21: mod_base = OTHER; note = 2'-O-methylguanosine-3'-phosphate
acaaaagcaaaacaggtctag

SEQ ID NO: 561 - RNA, 21 nt, synthetic construct
  source 1..21: mol_type = other RNA; note = Description of Artificial Sequence: Synthetic oligonucleotide
  modified_base 1: mod_base = OTHER; note = 2'-O-methylcytidine-3'-phosphorothioate
  modified_base 2: mod_base = OTHER; note = 2'-O-methyluridine-3'-phosphorothioate
  modified_base 3: mod_base = OTHER; note = 2'-fluoroadenosine-3'-phosphate
  modified_base 4: mod_base = OTHER; note = 2'-O-methylguanosine-3'-phosphate
  modified_base 5: mod_base = OTHER; note = 2'-fluoroadenosine-3'-phosphate
  modified_base 6: mod_base = OTHER; note = 2'-O-methylcytidine-3'-phosphate
  modified_base 7: mod_base = OTHER; note = 2'-fluorocytidine-3'-phosphate
  modified_base 8: mod_base = OTHER; note = 2'-O-methyluridine-3'-phosphate
  modified_base 9: mod_base = OTHER; note = 2'-fluoroguanosine-3'-phosphate
  modified_base 10: mod_base = OTHER; note = 2'-fluorouridine-3'-phosphate
  modified_base 11: mod_base = OTHER; note = 2'-fluorouridine-3'-phosphate
  modified_base 12: mod_base = OTHER; note = 2'-O-methyluridine-3'-phosphate
  modified_base 13: mod_base = OTHER; note = 2'-fluorouridine-3'-phosphate
  modified_base 14: mod_base = OTHER; note = 2'-O-methylguanosine-3'-phosphate
  modified_base 15: mod_base = OTHER; note = 2'-fluorocytidine-3'-phosphate
  modified_base 16: mod_base = OTHER; note = 2'-O-methyluridine-3'-phosphate
  modified_base 17: mod_base = OTHER; note = 2'-fluorouridine-3'-phosphate
  modified_base 18: mod_base = OTHER; note = 2'-O-methyluridine-3'-phosphate
  modified_base 19: mod_base = OTHER; note = 2'-fluorouridine-3'-phosphate
  modified_base 20: mod_base = OTHER; note = 2'-O-methylguanosine-3'-phosphate
  modified_base 21: mod_base = OTHER; note = 2'-fluorouridine-3'-phosphate N-[tris(GalNAc-alkyl)-amidodecanoyl)]-4-hydroxyprolinol Hyp-(GalNAc-alkyl)3
ctagacctgttttgcttttgt

SEQ ID NO: 562 - RNA, 21 nt, synthetic construct
  source 1..21: mol_type = other RNA; note = Description of Artificial Sequence: Synthetic oligonucleotide
  modified_base 1: mod_base = OTHER; note = 2'-O-methyladenosine-3'-phosphorothioate
  modified_base 2: mod_base = OTHER; note = 2'-fluorocytidine-3'-phosphorothioate
  modified_base 3: mod_base = OTHER; note = 2'-O-methyladenosine-3'-phosphate
  modified_base 4: mod_base = OTHER; note = 2'-fluoroadenosine-3'-phosphate
  modified_base 5: mod_base = OTHER; note = 2'-O-methyladenosine-3'-phosphate
  modified_base 6: mod_base = OTHER; note = 2'-fluoroadenosine-3'-phosphate
  modified_base 7: mod_base = OTHER; note = 2'-O-methylguanosine-3'-phosphate
  modified_base 8: mod_base = OTHER; note = 2'-fluorocytidine-3'-phosphate
  modified_base 9: mod_base = OTHER; note = 2'-O-methyladenosine-3'-phosphate
  modified_base 10: mod_base = OTHER; note = 2'-fluoroadenosine-3'-phosphate
  modified_base 11: mod_base = OTHER; note = 2'-O-methyladenosine-3'-phosphate
  modified_base 12: mod_base = OTHER; note = 2'-O-methyladenosine-3'-phosphate
  modified_base 13: mod_base = OTHER; note = 2'-O-methylcytidine-3'-phosphate
  modified_base 14: mod_base = OTHER; note = 2'-fluoroadenosine-3'-phosphate
  modified_base 15: mod_base = OTHER; note = 2'-O-methylguanosine-3'-phosphate
  modified_base 16: mod_base = OTHER; note = 2'-fluoroguanosine-3'-phosphate
  modified_base 17: mod_base = OTHER; note = 2'-O-methyluridine-3'-phosphate
  modified_base 18: mod_base = OTHER; note = 2'-fluorocytidine-3'-phosphate
  modified_base 19: mod_base = OTHER; note = 2'-O-methyluridine-3'-phosphorothioate
  modified_base 20: mod_base = OTHER; note = 2'-O-methyladenosine-3'-phosphorothioate
  modified_base 21: mod_base = OTHER; note = 2'-O-methylguanosine-3'-phosphate
acaaaagcaaaacaggtctag

SEQ ID NO: 563 - RNA, 21 nt, synthetic construct
  source 1..21: mol_type = other RNA; note = Description of Artificial Sequence: Synthetic oligonucleotide
  modified_base 1: mod_base = OTHER; note = 2'-fluorouridine-3'-phosphate
  modified_base 2: mod_base = OTHER; note = 2'-O-methyladenosine-3'-phosphate
  modified_base 3: mod_base = OTHER; note = 2'-fluoroguanosine-3'-phosphate
  modified_base 4: mod_base = OTHER; note = 2'-O-methyladenosine-3'-phosphate
  modified_base 5: mod_base = OTHER; note = 2'-fluorocytidine-3'-phosphate
  modified_base 6: mod_base = OTHER; note = 2'-O-methylcytidine-3'-phosphate
  modified_base 7: mod_base = OTHER; note = 2'-fluorouridine-3'-phosphate
  modified_base 8: mod_base = OTHER; note = 2'-O-methylguanosine-3'-phosphate
  modified_base 9: mod_base = OTHER; note = 2'-fluorouridine-3'-phosphate
  modified_base 10: mod_base = OTHER; note = 2'-fluorouridine-3'-phosphate
  modified_base 11: mod_base = OTHER; note = 2'-fluorouridine-3'-phosphate
  modified_base 12: mod_base = OTHER; note = 2'-O-methyluridine-3'-phosphate
  modified_base 13: mod_base = OTHER; note = 2'-fluoroguanosine-3'-phosphate
  modified_base 14: mod_base = OTHER; note = 2'-O-methylcytidine-3'-phosphate
  modified_base 15: mod_base = OTHER; note = 2'-fluorouridine-3'-phosphate
  modified_base 16: mod_base = OTHER; note = 2'-O-methyluridine-3'-phosphate
  modified_base 17: mod_base = OTHER; note = 2'-fluorouridine-3'-phosphate
  modified_base 18: mod_base = OTHER; note = 2'-O-methyluridine-3'-phosphate
  modified_base 19: mod_base = OTHER; note = 2'-fluoroguanosine-3'-phosphate
  modified_base 20: mod_base = OTHER; note = 2'-O-methyluridine-3'-phosphate
  modified_base 21: mod_base = OTHER; note = 2'-fluoroadenosine-3'-phosphate N-[tris(GalNAc-alkyl)-amidodecanoyl)]-4-hydroxyprolinol Hyp-(GalNAc-alkyl)3
tagacctgttttgcttttgta

SEQ ID NO: 564 - RNA, 23 nt, synthetic construct
  source 1..23: mol_type = other RNA; note = Description of Artificial Sequence: Synthetic oligonucleotide
  modified_base 1: mod_base = OTHER; note = 2'-O-methyluridine-3'-phosphate
  modified_base 2: mod_base = OTHER; note = 2'-fluoroadenosine-3'-phosphate
  modified_base 3: mod_base = OTHER; note = 2'-O-methylcytidine-3'-phosphate
  modified_base 4: mod_base = OTHER; note = 2'-fluoroadenosine-3'-phosphate
  modified_base 5: mod_base = OTHER; note = 2'-O-methyladenosine-3'-phosphate
  modified_base 6: mod_base = OTHER; note = 2'-fluoroadenosine-3'-phosphate
  modified_base 7: mod_base = OTHER; note = 2'-O-methyladenosine-3'-phosphate
  modified_base 8: mod_base = OTHER; note = 2'-fluoroguanosine-3'-phosphate
  modified_base 9: mod_base = OTHER; note = 2'-O-methylcytidine-3'-phosphate
  modified_base 10: mod_base = OTHER; note = 2'-fluoroadenosine-3'-phosphate
  modified_base 11: mod_base = OTHER; note = 2'-O-methyladenosine-3'-phosphate
  modified_base 12: mod_base = OTHER; note = 2'-O-methyladenosine-3'-phosphate
  modified_base 13: mod_base = OTHER; note = 2'-O-methyladenosine-3'-phosphate
  modified_base 14: mod_base = OTHER; note = 2'-fluorocytidine-3'-phosphate
  modified_base 15: mod_base = OTHER; note = 2'-O-methyladenosine-3'-phosphate
  modified_base 16: mod_base = OTHER; note = 2'-fluoroguanosine-3'-phosphate
  modified_base 17: mod_base = OTHER; note = 2'-O-methylguanosine-3'-phosphate
  modified_base 18: mod_base = OTHER; note = 2'-fluorouridine-3'-phosphate
  modified_base 19: mod_base = OTHER; note = 2'-O-methylcytidine-3'-phosphate
  modified_base 20: mod_base = OTHER; note = 2'-fluorouridine-3'-phosphate
  modified_base 21: mod_base = OTHER; note = 2'-O-methyladenosine-3'-phosphorothioate
  modified_base 22: mod_base = OTHER; note = 2'-fluoroguanosine-3'-phosphorothioate
  modified_base 23: mod_base = OTHER; note = 2'-O-methyladenosine-3'-phosphate
tacaaaagcaaaacaggtctaga

SEQ ID NO: 565 - RNA, 20 nt, synthetic construct
  source 1..20: mol_type = other RNA; note = Description of Artificial Sequence: Synthetic oligonucleotide
  modified_base 1: mod_base = OTHER; note = 2'-O-methyluridine-3'-phosphorothioate
  modified_base 2: mod_base = OTHER; note = 2'-fluoroadenosine-3'-phosphorothioate
  modified_base 3: mod_base = OTHER; note = 2'-O-methylguanosine-3'-phosphate
  modified_base 4: mod_base = OTHER; note = 2'-fluoroadenosine-3'-phosphate
  modified_base 5: mod_base = OTHER; note = 2'-O-methylcytidine-3'-phosphate
  modified_base 6: mod_base = OTHER; note = 2'-fluorocytidine-3'-phosphate
  modified_base 7: mod_base = OTHER; note = 2'-O-methyluridine-3'-phosphate
  modified_base 8: mod_base = OTHER; note = 2'-fluoroguanosine-3'-phosphate
  modified_base 9: mod_base = OTHER; note = 2'-fluorouridine-3'-phosphate
  modified_base 10: mod_base = OTHER; note = 2'-fluorouridine-3'-phosphate
  modified_base 11: mod_base = OTHER; note = 2'-O-methyluridine-3'-phosphate
  modified_base 12: mod_base = OTHER; note = 2'-fluorouridine-3'-phosphate
  modified_base 13: mod_base = OTHER; note = 2'-O-methylguanosine-3'-phosphate
  modified_base 14: mod_base = OTHER; note = 2'-fluorocytidine-3'-phosphate
  modified_base 15: mod_base = OTHER; note = 2'-O-methyluridine-3'-phosphate
  modified_base 16: mod_base = OTHER; note = 2'-fluorouridine-3'-phosphate
  modified_base 17: mod_base = OTHER; note = 2'-O-methyluridine-3'-phosphate
  modified_base 18: mod_base = OTHER; note = 2'-fluorouridine-3'-phosphate
  modified_base 19: mod_base = OTHER; note = 2'-O-methylguanosine-3'-phosphate
  modified_base 20: mod_base = OTHER; note = 2'-fluorouridine-3'-phosphate N-[tris(GalNAc-alkyl)-amidodecanoyl)]-4-hydroxyprolinol Hyp-(GalNAc-alkyl)3
tagacctgttttgcttttgt

SEQ ID NO: 566 - RNA, 20 nt, synthetic construct
  source 1..20: mol_type = other RNA; note = Description of Artificial Sequence: Synthetic oligonucleotide
  modified_base 1: mod_base = OTHER; note = 2'-O-methyladenosine-3'-phosphorothioate
  modified_base 2: mod_base = OTHER; note = 2'-fluorocytidine-3'-phosphorothioate
  modified_base 3: mod_base = OTHER; note = 2'-O-methyladenosine-3'-phosphate
  modified_base 4: mod_base = OTHER; note = 2'-fluoroadenosine-3'-phosphate
  modified_base 5: mod_base = OTHER; note = 2'-O-methyladenosine-3'-phosphate
  modified_base 6: mod_base = OTHER; note = 2'-fluoroadenosine-3'-phosphate
  modified_base 7: mod_base = OTHER; note = 2'-O-methylguanosine-3'-phosphate
  modified_base 8: mod_base = OTHER; note = 2'-fluorocytidine-3'-phosphate
  modified_base 9: mod_base = OTHER; note = 2'-O-methyladenosine-3'-phosphate
  modified_base 10: mod_base = OTHER; note = 2'-fluoroadenosine-3'-phosphate
  modified_base 11: mod_base = OTHER; note = 2'-O-methyladenosine-3'-phosphate
  modified_base 12: mod_base = OTHER; note = 2'-O-methyladenosine-3'-phosphate
  modified_base 13: mod_base = OTHER; note = 2'-O-methylcytidine-3'-phosphate
  modified_base 14: mod_base = OTHER; note = 2'-fluoroadenosine-3'-phosphate
  modified_base 15: mod_base = OTHER; note = 2'-O-methylguanosine-3'-phosphate
  modified_base 16: mod_base = OTHER; note = 2'-fluoroguanosine-3'-phosphate
  modified_base 17: mod_base = OTHER; note = 2'-O-methyluridine-3'-phosphate
  modified_base 18: mod_base = OTHER; note = 2'-fluorocytidine-3'-phosphorothioate
  modified_base 19: mod_base = OTHER; note = 2'-O-methyluridine-3'-phosphorothioate
  modified_base 20: mod_base = OTHER; note = 2'-fluoroadenosine-3'-phosphate
acaaaagcaaaacaggtcta

SEQ ID NO: 567 - RNA, 18 nt, synthetic construct
  source 1..18: mol_type = other RNA; note = Description of Artificial Sequence: Synthetic oligonucleotide
  modified_base 1: mod_base = OTHER; note = 2'-O-methylguanosine-3'-phosphorothioate
  modified_base 2: mod_base = OTHER; note = 2'-fluoroadenosine-3'-phosphorothioate
  modified_base 3: mod_base = OTHER; note = 2'-O-methylcytidine-3'-phosphate
  modified_base 4: mod_base = OTHER; note = 2'-fluorocytidine-3'-phosphate
  modified_base 5: mod_base = OTHER; note = 2'-O-methyluridine-3'-phosphate
  modified_base 6: mod_base = OTHER; note = 2'-fluoroguanosine-3'-phosphate
  modified_base 7: mod_base = OTHER; note = 2'-fluorouridine-3'-phosphate
  modified_base 8: mod_base = OTHER; note = 2'-fluorouridine-3'-phosphate
  modified_base 9: mod_base = OTHER; note = 2'-O-methyluridine-3'-phosphate
  modified_base 10: mod_base = OTHER; note = 2'-fluorouridine-3'-phosphate
  modified_base 11: mod_base = OTHER; note = 2'-O-methylguanosine-3'-phosphate
  modified_base 12: mod_base = OTHER; note = 2'-fluorocytidine-3'-phosphate
  modified_base 13: mod_base = OTHER; note = 2'-O-methyluridine-3'-phosphate
  modified_base 14: mod_base = OTHER; note = 2'-fluorouridine-3'-phosphate
  modified_base 15: mod_base = OTHER; note = 2'-O-methyluridine-3'-phosphate
  modified_base 16: mod_base = OTHER; note = 2'-fluorouridine-3'-phosphate
  modified_base 17: mod_base = OTHER; note = 2'-O-methylguanosine-3'-phosphate
  modified_base 18: mod_base = OTHER; note = 2'-fluorouridine-3'-phosphate N-[tris(GalNAc-alkyl)-amidodecanoyl)]-4-hydroxyprolinol Hyp-(GalNAc-alkyl)3
gacctgttttgcttttgt

SEQ ID NO: 568 - RNA, 20 nt, synthetic construct
  source 1..20: mol_type = other RNA; note = Description of Artificial Sequence: Synthetic oligonucleotide
  modified_base 1: mod_base = OTHER; note = 2'-O-methyladenosine-3'-phosphorothioate
  modified_base 2: mod_base = OTHER; note = 2'-fluorocytidine-3'-phosphorothioate
  modified_base 3: mod_base = OTHER; note = 2'-O-methyladenosine-3'-phosphate
  modified_base 4: mod_base = OTHER; note = 2'-fluoroadenosine-3'-phosphate
  modified_base 5: mod_base = OTHER; note = 2'-O-methyladenosine-3'-phosphate
  modified_base 6: mod_base = OTHER; note = 2'-fluoroadenosine-3'-phosphate
  modified_base 7: mod_base = OTHER; note = 2'-O-methylguanosine-3'-phosphate
  modified_base 8: mod_base = OTHER; note = 2'-fluorocytidine-3'-phosphate
  modified_base 9: mod_base = OTHER; note = 2'-O-methyladenosine-3'-phosphate
  modified_base 10: mod_base = OTHER; note = 2'-fluoroadenosine-3'-phosphate
  modified_base 11: mod_base = OTHER; note = 2'-O-methyladenosine-3'-phosphate
  modified_base 12: mod_base = OTHER; note = 2'-O-methyladenosine-3'-phosphate
  modified_base 13: mod_base = OTHER; note = 2'-O-methylcytidine-3'-phosphate
  modified_base 14: mod_base = OTHER; note = 2'-fluoroadenosine-3'-phosphate
  modified_base 15: mod_base = OTHER; note = 2'-O-methylguanosine-3'-phosphate
  modified_base 16: mod_base = OTHER; note = 2'-fluoroguanosine-3'-phosphate
  modified_base 17: mod_base = OTHER; note = 2'-O-methyluridine-3'-phosphate
  modified_base 18: mod_base = OTHER; note = 2'-fluorocytidine-3'-phosphorothioate
  modified_base 19: mod_base = OTHER; note = 2'-O-methyluridine-3'-phosphorothioate
  modified_base 20: mod_base = OTHER; note = 2'-O-methyladenosine-3'-phosphate
acaaaagcaaaacaggtcta

SEQ ID NO: 569 - RNA, 19 nt, synthetic construct
  source 1..19: mol_type = other RNA; note = Description of Artificial Sequence: Synthetic oligonucleotide
  modified_base 1: mod_base = OTHER; note = 2'-fluoroadenosine-3'-phosphorothioate
  modified_base 2: mod_base = OTHER; note = 2'-O-methylguanosine-3'-phosphorothioate
  modified_base 3: mod_base = OTHER; note = 2'-fluoroadenosine-3'-phosphate
  modified_base 4: mod_base = OTHER; note = 2'-O-methylcytidine-3'-phosphate
  modified_base 5: mod_base = OTHER; note = 2'-fluorocytidine-3'-phosphate
  modified_base 6: mod_base = OTHER; note = 2'-O-methyluridine-3'-phosphate
  modified_base 7: mod_base = OTHER; note = 2'-fluoroguanosine-3'-phosphate
  modified_base 8: mod_base = OTHER; note = 2'-fluorouridine-3'-phosphate
  modified_base 9: mod_base = OTHER; note = 2'-fluorouridine-3'-phosphate
  modified_base 10: mod_base = OTHER; note = 2'-O-methyluridine-3'-phosphate
  modified_base 11: mod_base = OTHER; note = 2'-fluorouridine-3'-phosphate
  modified_base 12: mod_base = OTHER; note = 2'-O-methylguanosine-3'-phosphate
  modified_base 13: mod_base = OTHER; note = 2'-fluorocytidine-3'-phosphate
  modified_base 14: mod_base = OTHER; note = 2'-O-methyluridine-3'-phosphate
  modified_base 15: mod_base = OTHER; note = 2'-fluorouridine-3'-phosphate
  modified_base 16: mod_base = OTHER; note = 2'-O-methyluridine-3'-phosphate
  modified_base 17: mod_base = OTHER; note = 2'-fluorouridine-3'-phosphate
  modified_base 18: mod_base = OTHER; note = 2'-O-methylguanosine-3'-phosphate
  modified_base 19: mod_base = OTHER; note = 2'-fluorouridine-3'-phosphate N-[tris(GalNAc-alkyl)-amidodecanoyl)]-4-hydroxyprolinol Hyp-(GalNAc-alkyl)3
agacctgttttgcttttgt

SEQ ID NO: 570 - RNA, 20 nt, synthetic construct
  source 1..20: mol_type = other RNA; note = Description of Artificial Sequence: Synthetic oligonucleotide
  modified_base 1: mod_base = OTHER; note = 2'-O-methyladenosine-3'-phosphorothioate
  modified_base 2: mod_base = OTHER; note = 2'-fluorocytidine-3'-phosphorothioate
  modified_base 3: mod_base = OTHER; note = 2'-O-methyladenosine-3'-phosphate
  modified_base 4: mod_base = OTHER; note = 2'-fluoroadenosine-3'-phosphate
  modified_base 5: mod_base = OTHER; note = 2'-O-methyladenosine-3'-phosphate
  modified_base 6: mod_base = OTHER; note = 2'-fluoroadenosine-3'-phosphate
  modified_base 7: mod_base = OTHER; note = 2'-O-methylguanosine-3'-phosphate
  modified_base 8: mod_base = OTHER; note = 2'-fluorocytidine-3'-phosphate
  modified_base 9: mod_base = OTHER; note = 2'-O-methyladenosine-3'-phosphate
  modified_base 10: mod_base = OTHER; note = 2'-fluoroadenosine-3'-phosphate
  modified_base 11: mod_base = OTHER; note = 2'-O-methyladenosine-3'-phosphate
  modified_base 12: mod_base = OTHER; note = 2'-O-methyladenosine-3'-phosphate
  modified_base 13: mod_base = OTHER; note = 2'-O-methylcytidine-3'-phosphate
  modified_base 14: mod_base = OTHER; note = 2'-fluoroadenosine-3'-phosphate
  modified_base 15: mod_base = OTHER; note = 2'-O-methylguanosine-3'-phosphate
  modified_base 16: mod_base = OTHER; note = 2'-fluoroguanosine-3'-phosphate
  modified_base 17: mod_base = OTHER; note = 2'-O-methyluridine-3'-phosphate
  modified_base 18: mod_base = OTHER; note = 2'-fluorocytidine-3'-phosphorothioate
  modified_base 19: mod_base = OTHER; note = 2'-O-methyluridine-3'-phosphorothioate
  modified_base 20: mod_base = OTHER; note = 2'-O-methyladenosine-3'-phosphate
acaaaagcaaaacaggtcta

SEQ ID NO: 571 - RNA, 20 nt, synthetic construct
  source 1..20: mol_type = other RNA; note = Description of Artificial Sequence: Synthetic oligonucleotide
  modified_base 1: mod_base = OTHER; note = 2'-O-methyluridine-3'-phosphorothioate
  modified_base 2: mod_base = OTHER; note = 2'-fluoroadenosine-3'-phosphorothioate
  modified_base 3: mod_base = OTHER; note = 2'-O-methylguanosine-3'-phosphate
  modified_base 4: mod_base = OTHER; note = 2'-fluoroadenosine-3'-phosphate
  modified_base 5: mod_base = OTHER; note = 2'-O-methylcytidine-3'-phosphate
  modified_base 6: mod_base = OTHER; note = 2'-fluorocytidine-3'-phosphate
  modified_base 7: mod_base = OTHER; note = 2'-O-methyluridine-3'-phosphate
  modified_base 8: mod_base = OTHER; note = 2'-fluoroguanosine-3'-phosphate
  modified_base 9: mod_base = OTHER; note = 2'-fluorouridine-3'-phosphate
  modified_base 10: mod_base = OTHER; note = 2'-fluorouridine-3'-phosphate
  modified_base 11: mod_base = OTHER; note = 2'-O-methyluridine-3'-phosphate
  modified_base 12: mod_base = OTHER; note = 2'-fluorouridine-3'-phosphate
  modified_base 13: mod_base = OTHER; note = 2'-O-methylguanosine-3'-phosphate
  modified_base 14: mod_base = OTHER; note = 2'-fluorocytidine-3'-phosphate
  modified_base 15: mod_base = OTHER; note = 2'-O-methyluridine-3'-phosphate
  modified_base 16: mod_base = OTHER; note = 2'-fluorouridine-3'-phosphate
  modified_base 17: mod_base = OTHER; note = 2'-O-methyluridine-3'-phosphate
  modified_base 18: mod_base = OTHER; note = 2'-fluorouridine-3'-phosphate
  modified_base 19: mod_base = OTHER; note = 2'-O-methylguanosine-3'-phosphate
  modified_base 20: mod_base = OTHER; note = 2'-fluorouridine-3'-phosphate N-[tris(GalNAc-alkyl)-amidodecanoyl)]-4-hydroxyprolinol Hyp-(GalNAc-alkyl)3
tagacctgttttgcttttgt

SEQ ID NO: 572 - RNA, 20 nt, synthetic construct
  source 1..20: mol_type = other RNA; note = Description of Artificial Sequence: Synthetic oligonucleotide
  modified_base 1: mod_base = OTHER; note = 2'-O-methyladenosine-3'-phosphorothioate
  modified_base 2: mod_base = OTHER; note = 2'-fluorocytidine-3'-phosphorothioate
  modified_base 3: mod_base = OTHER; note = 2'-O-methyladenosine-3'-phosphate
  modified_base 4: mod_base = OTHER; note = 2'-fluoroadenosine-3'-phosphate
  modified_base 5: mod_base = OTHER; note = 2'-O-methyladenosine-3'-phosphate
  modified_base 6: mod_base = OTHER; note = 2'-fluoroadenosine-3'-phosphate
  modified_base 7: mod_base = OTHER; note = 2'-O-methylguanosine-3'-phosphate
  modified_base 8: mod_base = OTHER; note = 2'-fluorocytidine-3'-phosphate
  modified_base 9: mod_base = OTHER; note = 2'-O-methyladenosine-3'-phosphate
  modified_base 10: mod_base = OTHER; note = 2'-fluoroadenosine-3'-phosphate
  modified_base 11: mod_base = OTHER; note = 2'-O-methyladenosine-3'-phosphate
  modified_base 12: mod_base = OTHER; note = 2'-O-methyladenosine-3'-phosphate
  modified_base 13: mod_base = OTHER; note = 2'-O-methylcytidine-3'-phosphate
  modified_base 14: mod_base = OTHER; note = 2'-fluoroadenosine-3'-phosphate
  modified_base 15: mod_base = OTHER; note = 2'-O-methylguanosine-3'-phosphate
  modified_base 16: mod_base = OTHER; note = 2'-fluoroguanosine-3'-phosphate
  modified_base 17: mod_base = OTHER; note = 2'-O-methyluridine-3'-phosphate
  modified_base 18: mod_base = OTHER; note = 2'-fluorocytidine-3'-phosphorothioate
  modified_base 19: mod_base = OTHER; note = 2'-O-methyluridine-3'-phosphorothioate
  modified_base 20: mod_base = OTHER; note = 2'-O-methyladenosine-3'-phosphate
acaaaagcaaaacaggtcta

SEQ ID NO: 573 - RNA, 19 nt, synthetic construct
  source 1..19: mol_type = other RNA; note = Description of Artificial Sequence: Synthetic oligonucleotide
  modified_base 1: mod_base = OTHER; note = 2'-fluoroadenosine-3'-phosphate
  modified_base 2: mod_base = OTHER; note = 2'-O-methylguanosine-3'-phosphate
  modified_base 3: mod_base = OTHER; note = 2'-fluoroadenosine-3'-phosphate
  modified_base 4: mod_base = OTHER; note = 2'-O-methylcytidine-3'-phosphate
  modified_base 5: mod_base = OTHER; note = 2'-fluorocytidine-3'-phosphate
  modified_base 6: mod_base = OTHER; note = 2'-O-methyluridine-3'-phosphate
  modified_base 7: mod_base = OTHER; note = 2'-fluoroguanosine-3'-phosphate
  modified_base 8: mod_base = OTHER; note = 2'-fluorouridine-3'-phosphate
  modified_base 9: mod_base = OTHER; note = 2'-fluorouridine-3'-phosphate
  modified_base 10: mod_base = OTHER; note = 2'-O-methyluridine-3'-phosphate
  modified_base 11: mod_base = OTHER; note = 2'-fluorouridine-3'-phosphate
  modified_base 12: mod_base = OTHER; note = 2'-O-methylguanosine-3'-phosphate
  modified_base 13: mod_base = OTHER; note = 2'-fluorocytidine-3'-phosphate
  modified_base 14: mod_base = OTHER; note = 2'-O-methyluridine-3'-phosphate
  modified_base 15: mod_base = OTHER; note = 2'-fluorouridine-3'-phosphate
  modified_base 16: mod_base = OTHER; note = 2'-O-methyluridine-3'-phosphate
  modified_base 17: mod_base = OTHER; note = 2'-fluorouridine-3'-phosphate
  modified_base 18: mod_base = OTHER; note = 2'-O-methylguanosine-3'-phosphate
  modified_base 19: mod_base = OTHER; note = 2'-fluorouridine-3'-phosphate N-[tris(GalNAc-alkyl)-amidodecanoyl)]-4-hydroxyprolinol Hyp-(GalNAc-alkyl)3
agacctgttttgcttttgt

SEQ ID NO: 574 - RNA, 21 nt, synthetic construct
  source 1..21: mol_type = other RNA; note = Description of Artificial Sequence: Synthetic oligonucleotide
  modified_base 1: mod_base = OTHER; note = 2'-O-methyladenosine-3'-phosphate
  modified_base 2: mod_base = OTHER; note = 2'-fluorocytidine-3'-phosphate
  modified_base 3: mod_base = OTHER; note = 2'-O-methyladenosine-3'-phosphate
  modified_base 4: mod_base = OTHER; note = 2'-fluoroadenosine-3'-phosphate
  modified_base 5: mod_base = OTHER; note = 2'-O-methyladenosine-3'-phosphate
  modified_base 6: mod_base = OTHER; note = 2'-fluoroadenosine-3'-phosphate
  modified_base 7: mod_base = OTHER; note = 2'-O-methylguanosine-3'-phosphate
  modified_base 8: mod_base = OTHER; note = 2'-fluorocytidine-3'-phosphate
  modified_base 9: mod_base = OTHER; note = 2'-O-methyladenosine-3'-phosphate
  modified_base 10: mod_base = OTHER; note = 2'-fluoroadenosine-3'-phosphate
  modified_base 11: mod_base = OTHER; note = 2'-O-methyladenosine-3'-phosphate
  modified_base 12: mod_base = OTHER; note = 2'-O-methyladenosine-3'-phosphate
  modified_base 13: mod_base = OTHER; note = 2'-O-methylcytidine-3'-phosphate
  modified_base 14: mod_base = OTHER; note = 2'-fluoroadenosine-3'-phosphate
  modified_base 15: mod_base = OTHER; note = 2'-O-methylguanosine-3'-phosphate
  modified_base 16: mod_base = OTHER; note = 2'-fluoroguanosine-3'-phosphate
  modified_base 17: mod_base = OTHER; note = 2'-O-methyluridine-3'-phosphate
  modified_base 18: mod_base = OTHER; note = 2'-fluorocytidine-3'-phosphate
  modified_base 19: mod_base = OTHER; note = 2'-O-methyluridine-3'-phosphorothioate
  modified_base 20: mod_base = OTHER; note = 2'-fluoroadenosine-3'-phosphorothioate
  modified_base 21: mod_base = OTHER; note = 2'-O-methylguanosine-3'-phosphate
acaaaagcaaaacaggtctag

SEQ ID NO: 575 - RNA, 19 nt, synthetic construct
  source 1..19: mol_type = other RNA; note = Description of Artificial Sequence: Synthetic oligonucleotide
  modified_base 1: mod_base = OTHER; note = 2'-fluoroadenosine-3'-phosphate
  modified_base 2: mod_base = OTHER; note = 2'-O-methylguanosine-3'-phosphate
  modified_base 3: mod_base = OTHER; note = 2'-fluoroadenosine-3'-phosphate
  modified_base 4: mod_base = OTHER; note = 2'-O-methylcytidine-3'-phosphate
  modified_base 5: mod_base = OTHER; note = 2'-fluorocytidine-3'-phosphate
  modified_base 6: mod_base = OTHER; note = 2'-O-methyluridine-3'-phosphate
  modified_base 7: mod_base = OTHER; note = 2'-fluoroguanosine-3'-phosphate
  modified_base 8: mod_base = OTHER; note = 2'-fluorouridine-3'-phosphate
  modified_base 9: mod_base = OTHER; note = 2'-fluorouridine-3'-phosphate
  modified_base 10: mod_base = OTHER; note = 2'-O-methyluridine-3'-phosphate
  modified_base 11: mod_base = OTHER; note = 2'-fluorouridine-3'-phosphate
  modified_base 12: mod_base = OTHER; note = 2'-O-methylguanosine-3'-phosphate
  modified_base 13: mod_base = OTHER; note = 2'-fluorocytidine-3'-phosphate
  modified_base 14: mod_base = OTHER; note = 2'-O-methyluridine-3'-phosphate
  modified_base 15: mod_base = OTHER; note = 2'-fluorouridine-3'-phosphate
  modified_base 16: mod_base = OTHER; note = 2'-O-methyluridine-3'-phosphate
  modified_base 17: mod_base = OTHER; note = 2'-O-methyluridine-3'-phosphate
  modified_base 18: mod_base = OTHER; note = 2'-O-methylguanosine-3'-phosphate
  modified_base 19: mod_base = OTHER; note = 2'-fluorouridine-3'-phosphate N-[tris(GalNAc-alkyl)-amidodecanoyl)]-4-hydroxyprolinol Hyp-(GalNAc-alkyl)3
agacctgttttgcttttgt

SEQ ID NO: 576 - RNA, 21 nt, synthetic construct
  source 1..21: mol_type = other RNA; note = Description of Artificial Sequence: Synthetic oligonucleotide
  modified_base 1: mod_base = OTHER; note = 2'-O-methyladenosine-3'-phosphate
  modified_base 2: mod_base = OTHER; note = 2'-fluorocytidine-3'-phosphate
  modified_base 3: mod_base = OTHER; note = 2'-fluoroadenosine-3'-phosphate
  modified_base 4: mod_base = OTHER; note = 2'-fluoroadenosine-3'-phosphate
  modified_base 5: mod_base = OTHER; note = 2'-O-methyladenosine-3'-phosphate
  modified_base 6: mod_base = OTHER; note = 2'-fluoroadenosine-3'-phosphate
  modified_base 7: mod_base = OTHER; note = 2'-O-methylguanosine-3'-phosphate
  modified_base 8: mod_base = OTHER; note = 2'-fluorocytidine-3'-phosphate
  modified_base 9: mod_base = OTHER; note = 2'-O-methyladenosine-3'-phosphate
  modified_base 10: mod_base = OTHER; note = 2'-fluoroadenosine-3'-phosphate
  modified_base 11: mod_base = OTHER; note = 2'-O-methyladenosine-3'-phosphate
  modified_base 12: mod_base = OTHER; note = 2'-O-methyladenosine-3'-phosphate
  modified_base 13: mod_base = OTHER; note = 2'-O-methylcytidine-3'-phosphate
  modified_base 14: mod_base = OTHER; note = 2'-fluoroadenosine-3'-phosphate
  modified_base 15: mod_base = OTHER; note = 2'-O-methylguanosine-3'-phosphate
  modified_base 16: mod_base = OTHER; note = 2'-fluoroguanosine-3'-phosphate
  modified_base 17: mod_base = OTHER; note = 2'-O-methyluridine-3'-phosphate
  modified_base 18: mod_base = OTHER; note = 2'-fluorocytidine-3'-phosphate
  modified_base 19: mod_base = OTHER; note = 2'-O-methyluridine-3'-phosphorothioate
  modified_base 20: mod_base = OTHER; note = 2'-fluoroadenosine-3'-phosphorothioate
  modified_base 21: mod_base = OTHER; note = 2'-O-methylguanosine-3'-phosphate
acaaaagcaaaacaggtctag

SEQ ID NO: 577 - RNA, 19 nt, synthetic construct
  source 1..19: mol_type = other RNA; note = Description of Artificial Sequence: Synthetic oligonucleotide
  modified_base 1: mod_base = OTHER; note = 2'-fluoroadenosine-3'-phosphate
  modified_base 2: mod_base = OTHER; note = 2'-O-methylguanosine-3'-phosphate
  modified_base 3: mod_base = OTHER; note = 2'-fluoroadenosine-3'-phosphate
  modified_base 4: mod_base = OTHER; note = 2'-O-methylcytidine-3'-phosphate
  modified_base 5: mod_base = OTHER; note = 2'-fluorocytidine-3'-phosphate
  modified_base 6: mod_base = OTHER; note = 2'-O-methyluridine-3'-phosphate
  modified_base 7: mod_base = OTHER; note = 2'-fluoroguanosine-3'-phosphate
  modified_base 8: mod_base = OTHER; note = 2'-fluorouridine-3'-phosphate
  modified_base 9: mod_base = OTHER; note = 2'-fluorouridine-3'-phosphate
  modified_base 10: mod_base = OTHER; note = 2'-O-methyluridine-3'-phosphate
  modified_base 11: mod_base = OTHER; note = 2'-fluorouridine-3'-phosphate
  modified_base 12: mod_base = OTHER; note = 2'-O-methylguanosine-3'-phosphate
  modified_base 13: mod_base = OTHER; note = 2'-fluorocytidine-3'-phosphate
  modified_base 14: mod_base = OTHER; note = 2'-O-methyluridine-3'-phosphate
  modified_base 15: mod_base = OTHER; note = 2'-O-methyluridine-3'-phosphate
  modified_base 16: mod_base = OTHER; note = 2'-O-methyluridine-3'-phosphate
  modified_base 17: mod_base = OTHER; note = 2'-fluorouridine-3'-phosphate
  modified_base 18: mod_base = OTHER; note = 2'-O-methylguanosine-3'-phosphate
  modified_base 19: mod_base = OTHER; note = 2'-fluorouridine-3'-phosphate N-[tris(GalNAc-alkyl)-amidodecanoyl)]-4-hydroxyprolinol Hyp-(GalNAc-alkyl)3
agacctgttttgcttttgt

SEQ ID NO: 578 - RNA, 21 nt, synthetic construct
  source 1..21: mol_type = other RNA; note = Description of Artificial Sequence: Synthetic oligonucleotide
  modified_base 1: mod_base = OTHER; note = 2'-O-methyladenosine-3'-phosphate
  modified_base 2: mod_base = OTHER; note = 2'-fluorocytidine-3'-phosphate
  modified_base 3: mod_base = OTHER; note = 2'-O-methyladenosine-3'-phosphate
  modified_base 4: mod_base = OTHER; note = 2'-fluoroadenosine-3'-phosphate
  modified_base 5: mod_base = OTHER; note = 2'-fluoroadenosine-3'-phosphate
  modified_base 6: mod_base = OTHER; note = 2'-fluoroadenosine-3'-phosphate
  modified_base 7: mod_base = OTHER; note = 2'-O-methylguanosine-3'-phosphate
  modified_base 8: mod_base = OTHER; note = 2'-fluorocytidine-3'-phosphate
  modified_base 9: mod_base = OTHER; note = 2'-O-methyladenosine-3'-phosphate
  modified_base 10: mod_base = OTHER; note = 2'-fluoroadenosine-3'-phosphate
  modified_base 11: mod_base = OTHER; note = 2'-O-methyladenosine-3'-phosphate
  modified_base 12: mod_base = OTHER; note = 2'-O-methyladenosine-3'-phosphate
  modified_base 13: mod_base = OTHER; note = 2'-O-methylcytidine-3'-phosphate
  modified_base 14: mod_base = OTHER; note = 2'-fluoroadenosine-3'-phosphate
  modified_base 15: mod_base = OTHER; note = 2'-O-methylguanosine-3'-phosphate
  modified_base 16: mod_base = OTHER; note = 2'-fluoroguanosine-3'-phosphate
  modified_base 17: mod_base = OTHER; note = 2'-O-methyluridine-3'-phosphate
  modified_base 18: mod_base = OTHER; note = 2'-fluorocytidine-3'-phosphate
  modified_base 19: mod_base = OTHER; note = 2'-O-methyluridine-3'-phosphorothioate
  modified_base 20: mod_base = OTHER; note = 2'-fluoroadenosine-3'-phosphorothioate
  modified_base 21: mod_base = OTHER; note = 2'-O-methylguanosine-3'-phosphate
acaaaagcaaaacaggtctag

SEQ ID NO: 579 - RNA, 19 nt, synthetic construct
  source 1..19: mol_type = other RNA; note = Description of Artificial Sequence: Synthetic oligonucleotide
  modified_base 1: mod_base = OTHER; note = 2'-fluoroadenosine-3'-phosphate
  modified_base 2: mod_base = OTHER; note = 2'-O-methylguanosine-3'-phosphate
  modified_base 3: mod_base = OTHER; note = 2'-fluoroadenosine-3'-phosphate
  modified_base 4: mod_base = OTHER; note = 2'-O-methylcytidine-3'-phosphate
  modified_base 5: mod_base = OTHER; note = 2'-fluorocytidine-3'-phosphate
  modified_base 6: mod_base = OTHER; note = 2'-O-methyluridine-3'-phosphate
  modified_base 7: mod_base = OTHER; note = 2'-fluoroguanosine-3'-phosphate
  modified_base 8: mod_base = OTHER; note = 2'-fluorouridine-3'-phosphate
  modified_base 9: mod_base = OTHER; note = 2'-fluorouridine-3'-phosphate
  modified_base 10: mod_base = OTHER; note = 2'-O-methyluridine-3'-phosphate
  modified_base 11: mod_base = OTHER; note = 2'-fluorouridine-3'-phosphate
  modified_base 12: mod_base = OTHER; note = 2'-O-methylguanosine-3'-phosphate
  modified_base 13: mod_base = OTHER; note = 2'-O-methylcytidine-3'-phosphate
  modified_base 14: mod_base = OTHER; note = 2'-O-methyluridine-3'-phosphate
  modified_base 15: mod_base = OTHER; note = 2'-fluorouridine-3'-phosphate
  modified_base 16: mod_base = OTHER; note = 2'-O-methyluridine-3'-phosphate
  modified_base 17: mod_base = OTHER; note = 2'-fluorouridine-3'-phosphate
  modified_base 18: mod_base = OTHER; note = 2'-O-methylguanosine-3'-phosphate
  modified_base 19: mod_base = OTHER; note = 2'-fluorouridine-3'-phosphate N-[tris(GalNAc-alkyl)-amidodecanoyl)]-4-hydroxyprolinol Hyp-(GalNAc-alkyl)3
agacctgttttgcttttgt

SEQ ID NO: 580 - RNA, 21 nt, synthetic construct
  source 1..21: mol_type = other RNA; note = Description of Artificial Sequence: Synthetic oligonucleotide
  modified_base 1: mod_base = OTHER; note = 2'-O-methyladenosine-3'-phosphate
  modified_base 2: mod_base = OTHER; note = 2'-fluorocytidine-3'-phosphate
  modified_base 3: mod_base = OTHER; note = 2'-O-methyladenosine-3'-phosphate
  modified_base 4: mod_base = OTHER; note = 2'-fluoroadenosine-3'-phosphate
  modified_base 5: mod_base = OTHER; note = 2'-O-methyladenosine-3'-phosphate
  modified_base 6: mod_base = OTHER; note = 2'-fluoroadenosine-3'-phosphate
  modified_base 7: mod_base = OTHER; note = 2'-fluoroguanosine-3'-phosphate
  modified_base 8: mod_base = OTHER; note = 2'-fluorocytidine-3'-phosphate
  modified_base 9: mod_base = OTHER; note = 2'-O-methyladenosine-3'-phosphate
  modified_base 10: mod_base = OTHER; note = 2'-fluoroadenosine-3'-phosphate
  modified_base 11: mod_base = OTHER; note = 2'-O-methyladenosine-3'-phosphate
  modified_base 12: mod_base = OTHER; note = 2'-O-methyladenosine-3'-phosphate
  modified_base 13: mod_base = OTHER; note = 2'-O-methylcytidine-3'-phosphate
  modified_base 14: mod_base = OTHER; note = 2'-fluoroadenosine-3'-phosphate
  modified_base 15: mod_base = OTHER; note = 2'-O-methylguanosine-3'-phosphate
  modified_base 16: mod_base = OTHER; note = 2'-fluoroguanosine-3'-phosphate
  modified_base 17: mod_base = OTHER; note = 2'-O-methyluridine-3'-phosphate
  modified_base 18: mod_base = OTHER; note = 2'-fluorocytidine-3'-phosphate
  modified_base 19: mod_base = OTHER; note = 2'-O-methyluridine-3'-phosphorothioate
  modified_base 20: mod_base = OTHER; note = 2'-fluoroadenosine-3'-phosphorothioate
  modified_base 21: mod_base = OTHER; note = 2'-O-methylguanosine-3'-phosphate
acaaaagcaaaacaggtctag

SEQ ID NO: 581 - RNA, 19 nt, synthetic construct
  source 1..19: mol_type = other RNA; note = Description of Artificial Sequence: Synthetic oligonucleotide
  modified_base 1: mod_base = OTHER; note = 2'-fluoroadenosine-3'-phosphate
  modified_base 2: mod_base = OTHER; note = 2'-O-methylguanosine-3'-phosphate
  modified_base 3: mod_base = OTHER; note = 2'-fluoroadenosine-3'-phosphate
  modified_base 4: mod_base = OTHER; note = 2'-O-methylcytidine-3'-phosphate
  modified_base 5: mod_base = OTHER; note = 2'-fluorocytidine-3'-phosphate
  modified_base 6: mod_base = OTHER; note = 2'-O-methyluridine-3'-phosphate
  modified_base 7: mod_base = OTHER; note = 2'-fluoroguanosine-3'-phosphate
  modified_base 8: mod_base = OTHER; note = 2'-fluorouridine-3'-phosphate
  modified_base 9: mod_base = OTHER; note = 2'-fluorouridine-3'-phosphate
  modified_base 10: mod_base = OTHER; note = 2'-O-methyluridine-3'-phosphate
  modified_base 11: mod_base = OTHER; note = 2'-O-methyluridine-3'-phosphate
  modified_base 12: mod_base = OTHER; note = 2'-O-methylguanosine-3'-phosphate
  modified_base 13: mod_base = OTHER; note = 2'-fluorocytidine-3'-phosphate
  modified_base 14: mod_base = OTHER; note = 2'-O-methyluridine-3'-phosphate
  modified_base 15: mod_base = OTHER; note = 2'-fluorouridine-3'-phosphate
  modified_base 16: mod_base = OTHER; note = 2'-O-methyluridine-3'-phosphate
  modified_base 17: mod_base = OTHER; note = 2'-fluorouridine-3'-phosphate
  modified_base 18: mod_base = OTHER; note = 2'-O-methylguanosine-3'-phosphate
  modified_base 19: mod_base = OTHER; note = 2'-fluorouridine-3'-phosphate N-[tris(GalNAc-alkyl)-amidodecanoyl)]-4-hydroxyprolinol Hyp-(GalNAc-alkyl)3
agacctgttttgcttttgt

SEQ ID NO: 582 - RNA, 21 nt, synthetic construct
  source 1..21: mol_type = other RNA; note = Description of Artificial Sequence: Synthetic oligonucleotide
  modified_base 1: mod_base = OTHER; note = 2'-O-methyladenosine-3'-phosphate
  modified_base 2: mod_base = OTHER; note = 2'-fluorocytidine-3'-phosphate
  modified_base 3: mod_base = OTHER; note = 2'-O-methyladenosine-3'-phosphate
  modified_base 4: mod_base = OTHER; note = 2'-fluoroadenosine-3'-phosphate
  modified_base 5: mod_base = OTHER; note = 2'-O-methyladenosine-3'-phosphate
  modified_base 6: mod_base = OTHER; note = 2'-fluoroadenosine-3'-phosphate
  modified_base 7: mod_base = OTHER; note = 2'-O-methylguanosine-3'-phosphate
  modified_base 8: mod_base = OTHER; note = 2'-fluorocytidine-3'-phosphate
  modified_base 9: mod_base = OTHER; note = 2'-fluoroadenosine-3'-phosphate
  modified_base 10: mod_base = OTHER; note = 2'-fluoroadenosine-3'-phosphate
  modified_base 11: mod_base = OTHER; note = 2'-O-methyladenosine-3'-phosphate
  modified_base 12: mod_base = OTHER; note = 2'-O-methyladenosine-3'-phosphate
  modified_base 13: mod_base = OTHER; note = 2'-O-methylcytidine-3'-phosphate
  modified_base 14: mod_base = OTHER; note = 2'-fluoroadenosine-3'-phosphate
  modified_base 15: mod_base = OTHER; note = 2'-O-methylguanosine-3'-phosphate
  modified_base 16: mod_base = OTHER; note = 2'-fluoroguanosine-3'-phosphate
  modified_base 17: mod_base = OTHER; note = 2'-O-methyluridine-3'-phosphate
  modified_base 18: mod_base = OTHER; note = 2'-fluorocytidine-3'-phosphate
  modified_base 19: mod_base = OTHER; note = 2'-O-methyluridine-3'-phosphorothioate
  modified_base 20: mod_base = OTHER; note = 2'-fluoroadenosine-3'-phosphorothioate
  modified_base 21: mod_base = OTHER; note = 2'-O-methylguanosine-3'-phosphate
acaaaagcaaaacaggtctag

SEQ ID NO: 583 - RNA, 19 nt, synthetic construct
  source 1..19: mol_type = other RNA; note = Description of Artificial Sequence: Synthetic oligonucleotide
  modified_base 1: mod_base = OTHER; note = 2'-fluoroadenosine-3'-phosphate
  modified_base 2: mod_base = OTHER; note = 2'-O-methylguanosine-3'-phosphate
  modified_base 3: mod_base = OTHER; note = 2'-fluoroadenosine-3'-phosphate
  modified_base 4: mod_base = OTHER; note = 2'-O-methylcytidine-3'-phosphate
  modified_base 5: mod_base = OTHER; note = 2'-O-methylcytidine-3'-phosphate
  modified_base 6: mod_base = OTHER; note = 2'-O-methyluridine-3'-phosphate
  modified_base 7: mod_base = OTHER; note = 2'-fluoroguanosine-3'-phosphate
  modified_base 8: mod_base = OTHER; note = 2'-fluorouridine-3'-phosphate
  modified_base 9: mod_base = OTHER; note = 2'-fluorouridine-3'-phosphate
  modified_base 10: mod_base = OTHER; note = 2'-O-methyluridine-3'-phosphate
  modified_base 11: mod_base = OTHER; note = 2'-fluorouridine-3'-phosphate
  modified_base 12: mod_base = OTHER; note = 2'-O-methylguanosine-3'-phosphate
  modified_base 13: mod_base = OTHER; note = 2'-fluorocytidine-3'-phosphate
  modified_base 14: mod_base = OTHER; note = 2'-O-methyluridine-3'-phosphate
  modified_base 15: mod_base = OTHER; note = 2'-fluorouridine-3'-phosphate
  modified_base 16: mod_base = OTHER; note = 2'-O-methyluridine-3'-phosphate
  modified_base 17: mod_base = OTHER; note = 2'-fluorouridine-3'-phosphate
  modified_base 18: mod_base = OTHER; note = 2'-O-methylguanosine-3'-phosphate
  modified_base 19: mod_base = OTHER; note = 2'-fluorouridine-3'-phosphate N-[tris(GalNAc-alkyl)-amidodecanoyl)]-4-hydroxyprolinol Hyp-(GalNAc-alkyl)3
agacctgttttgcttttgt

SEQ ID NO: 584 - RNA, 21 nt, synthetic construct
  source 1..21: mol_type = other RNA; note = Description of Artificial Sequence: Synthetic oligonucleotide
  modified_base 1: mod_base = OTHER; note = 2'-O-methyladenosine-3'-phosphate
  modified_base 2: mod_base = OTHER; note = 2'-fluorocytidine-3'-phosphate
  modified_base 3: mod_base = OTHER; note = 2'-O-methyladenosine-3'-phosphate
  modified_base 4: mod_base = OTHER; note = 2'-fluoroadenosine-3'-phosphate
  modified_base 5: mod_base = OTHER; note = 2'-O-methyladenosine-3'-phosphate
  modified_base 6: mod_base = OTHER; note = 2'-fluoroadenosine-3'-phosphate
  modified_base 7: mod_base = OTHER; note = 2'-O-methylguanosine-3'-phosphate
  modified_base 8: mod_base = OTHER; note = 2'-fluorocytidine-3'-phosphate
  modified_base 9: mod_base = OTHER; note = 2'-O-methyladenosine-3'-phosphate
  modified_base 10: mod_base = OTHER; note = 2'-fluoroadenosine-3'-phosphate
  modified_base 11: mod_base = OTHER; note = 2'-O-methyladenosine-3'-phosphate
  modified_base 12: mod_base = OTHER; note = 2'-O-methyladenosine-3'-phosphate
  modified_base 13: mod_base = OTHER; note = 2'-O-methylcytidine-3'-phosphate
  modified_base 14: mod_base = OTHER; note = 2'-fluoroadenosine-3'-phosphate
  modified_base 15: mod_base = OTHER; note = 2'-fluoroguanosine-3'-phosphate
  modified_base 16: mod_base = OTHER; note = 2'-fluoroguanosine-3'-phosphate
  modified_base 17: mod_base = OTHER; note = 2'-O-methyluridine-3'-phosphate
  modified_base 18: mod_base = OTHER; note = 2'-fluorocytidine-3'-phosphate
  modified_base 19: mod_base = OTHER; note = 2'-O-methyluridine-3'-phosphorothioate
  modified_base 20: mod_base = OTHER; note = 2'-fluoroadenosine-3'-phosphorothioate
  modified_base 21: mod_base = OTHER; note = 2'-O-methylguanosine-3'-phosphate
acaaaagcaaaacaggtctag

SEQ ID NO: 585 - RNA, 19 nt, synthetic construct
  source 1..19: mol_type = other RNA; note = Description of Artificial Sequence: Synthetic oligonucleotide
  modified_base 1: mod_base = OTHER; note = 2'-fluoroadenosine-3'-phosphate
  modified_base 2: mod_base = OTHER; note = 2'-O-methylguanosine-3'-phosphate
  modified_base 3: mod_base = OTHER; note = 2'-O-methyladenosine-3'-phosphate
  modified_base 4: mod_base = OTHER; note = 2'-O-methylcytidine-3'-phosphate
  modified_base 5: mod_base = OTHER; note = 2'-fluorocytidine-3'-phosphate
  modified_base 6: mod_base = OTHER; note = 2'-O-methyluridine-3'-phosphate
  modified_base 7: mod_base = OTHER; note = 2'-fluoroguanosine-3'-phosphate
  modified_base 8: mod_base = OTHER; note = 2'-fluorouridine-3'-phosphate
  modified_base 9: mod_base = OTHER; note = 2'-fluorouridine-3'-phosphate
  modified_base 10: mod_base = OTHER; note = 2'-O-methyluridine-3'-phosphate
  modified_base 11: mod_base = OTHER; note = 2'-fluorouridine-3'-phosphate
  modified_base 12: mod_base = OTHER; note = 2'-O-methylguanosine-3'-phosphate
  modified_base 13: mod_base = OTHER; note = 2'-fluorocytidine-3'-phosphate
  modified_base 14: mod_base = OTHER; note = 2'-O-methyluridine-3'-phosphate
  modified_base 15: mod_base = OTHER; note = 2'-fluorouridine-3'-phosphate
  modified_base 16: mod_base = OTHER; note = 2'-O-methyluridine-3'-phosphate
  modified_base 17: mod_base = OTHER; note = 2'-fluorouridine-3'-phosphate
  modified_base 18: mod_base = OTHER; note = 2'-O-methylguanosine-3'-phosphate
  modified_base 19: mod_base = OTHER; note = 2'-fluorouridine-3'-phosphate N-[tris(GalNAc-alkyl)-amidodecanoyl)]-4-hydroxyprolinol Hyp-(GalNAc-alkyl)3
agacctgttttgcttttgt

SEQ ID NO: 586 - RNA, 21 nt, synthetic construct
  source 1..21: mol_type = other RNA; note = Description of Artificial Sequence: Synthetic oligonucleotide
  modified_base 1: mod_base = OTHER; note = 2'-O-methyladenosine-3'-phosphate
  modified_base 2: mod_base = OTHER; note = 2'-fluorocytidine-3'-phosphate
  modified_base 3: mod_base = OTHER; note = 2'-O-methyladenosine-3'-phosphate
  modified_base 4: mod_base = OTHER; note = 2'-fluoroadenosine-3'-phosphate
  modified_base 5: mod_base = OTHER; note = 2'-O-methyladenosine-3'-phosphate
  modified_base 6: mod_base = OTHER; note = 2'-fluoroadenosine-3'-phosphate
  modified_base 7: mod_base = OTHER; note = 2'-O-methylguanosine-3'-phosphate
  modified_base 8: mod_base = OTHER; note = 2'-fluorocytidine-3'-phosphate
  modified_base 9: mod_base = OTHER; note = 2'-O-methyladenosine-3'-phosphate
  modified_base 10: mod_base = OTHER; note = 2'-fluoroadenosine-3'-phosphate
  modified_base 11: mod_base = OTHER; note = 2'-O-methyladenosine-3'-phosphate
  modified_base 12: mod_base = OTHER; note = 2'-O-methyladenosine-3'-phosphate
  modified_base 13: mod_base = OTHER; note = 2'-O-methylcytidine-3'-phosphate
  modified_base 14: mod_base = OTHER; note = 2'-fluoroadenosine-3'-phosphate
  modified_base 15: mod_base = OTHER; note = 2'-O-methylguanosine-3'-phosphate
  modified_base 16: mod_base = OTHER; note = 2'-fluoroguanosine-3'-phosphate
  modified_base 17: mod_base = OTHER; note = 2'-fluorouridine-3'-phosphate
  modified_base 18: mod_base = OTHER; note = 2'-fluorocytidine-3'-phosphate
  modified_base 19: mod_base = OTHER; note = 2'-O-methyluridine-3'-phosphorothioate
  modified_base 20: mod_base = OTHER; note = 2'-fluoroadenosine-3'-phosphorothioate
  modified_base 21: mod_base = OTHER; note = 2'-O-methylguanosine-3'-phosphate
acaaaagcaaaacaggtctag

SEQ ID NO: 587 - RNA, 19 nt, synthetic construct
  source 1..19: mol_type = other RNA; note = Description of Artificial Sequence: Synthetic oligonucleotide
  modified_base 1: mod_base = OTHER; note = 2'-O-methyladenosine-3'-phosphate
  modified_base 2: mod_base = OTHER; note = 2'-O-methylguanosine-3'-phosphate
  modified_base 3: mod_base = OTHER; note = 2'-fluoroadenosine-3'-phosphate
  modified_base 4: mod_base = OTHER; note = 2'-O-methylcytidine-3'-phosphate
  modified_base 5: mod_base = OTHER; note = 2'-fluorocytidine-3'-phosphate
  modified_base 6: mod_base = OTHER; note = 2'-O-methyluridine-3'-phosphate
  modified_base 7: mod_base = OTHER; note = 2'-fluoroguanosine-3'-phosphate
  modified_base 8: mod_base = OTHER; note = 2'-fluorouridine-3'-phosphate
  modified_base 9: mod_base = OTHER; note = 2'-fluorouridine-3'-phosphate
  modified_base 10: mod_base = OTHER; note = 2'-O-methyluridine-3'-phosphate
  modified_base 11: mod_base = OTHER; note = 2'-fluorouridine-3'-phosphate
  modified_base 12: mod_base = OTHER; note = 2'-O-methylguanosine-3'-phosphate
  modified_base 13: mod_base = OTHER; note = 2'-fluorocytidine-3'-phosphate
  modified_base 14: mod_base = OTHER; note = 2'-O-methyluridine-3'-phosphate
  modified_base 15: mod_base = OTHER; note = 2'-fluorouridine-3'-phosphate
  modified_base 16: mod_base = OTHER; note = 2'-O-methyluridine-3'-phosphate
  modified_base 17: mod_base = OTHER; note = 2'-fluorouridine-3'-phosphate
  modified_base 18: mod_base = OTHER; note = 2'-O-methylguanosine-3'-phosphate
  modified_base 19: mod_base = OTHER; note = 2'-fluorouridine-3'-phosphate N-[tris(GalNAc-alkyl)-amidodecanoyl)]-4-hydroxyprolinol Hyp-(GalNAc-alkyl)3
agacctgttttgcttttgt

SEQ ID NO: 588 - RNA, 21 nt, synthetic construct
  source 1..21: mol_type = other RNA; note = Description of Artificial Sequence: Synthetic oligonucleotide
  modified_base 1: mod_base = OTHER; note = 2'-O-methyladenosine-3'-phosphate
  modified_base 2: mod_base = OTHER; note = 2'-fluorocytidine-3'-phosphate
  modified_base 3: mod_base = OTHER; note = 2'-O-methyladenosine-3'-phosphate
  modified_base 4: mod_base = OTHER; note = 2'-fluoroadenosine-3'-phosphate
  modified_base 5: mod_base = OTHER; note = 2'-O-methyladenosine-3'-phosphate
  modified_base 6: mod_base = OTHER; note = 2'-fluoroadenosine-3'-phosphate
  modified_base 7: mod_base = OTHER; note = 2'-O-methylguanosine-3'-phosphate
  modified_base 8: mod_base = OTHER; note = 2'-fluorocytidine-3'-phosphate
  modified_base 9: mod_base = OTHER; note = 2'-O-methyladenosine-3'-phosphate
  modified_base 10: mod_base = OTHER; note = 2'-fluoroadenosine-3'-phosphate
  modified_base 11: mod_base = OTHER; note = 2'-O-methyladenosine-3'-phosphate
  modified_base 12: mod_base = OTHER; note = 2'-O-methyladenosine-3'-phosphate
  modified_base 13: mod_base = OTHER; note = 2'-O-methylcytidine-3'-phosphate
  modified_base 14: mod_base = OTHER; note = 2'-fluoroadenosine-3'-phosphate
  modified_base 15: mod_base = OTHER; note = 2'-O-methylguanosine-3'-phosphate
  modified_base 16: mod_base = OTHER; note = 2'-fluoroguanosine-3'-phosphate
  modified_base 17: mod_base = OTHER; note = 2'-O-methyluridine-3'-phosphate
  modified_base 18: mod_base = OTHER; note = 2'-fluorocytidine-3'-phosphate
  modified_base 19: mod_base = OTHER; note = 2'-fluorouridine-3'-phosphorothioate
  modified_base 20: mod_base = OTHER; note = 2'-fluoroadenosine-3'-phosphorothioate
  modified_base 21: mod_base = OTHER; note = 2'-O-methylguanosine-3'-phosphate
acaaaagcaaaacaggtctag

SEQ ID NO: 589 - RNA, 19 nt, synthetic construct
  source 1..19: mol_type = other RNA; note = Description of Artificial Sequence: Synthetic oligonucleotide
  modified_base 1: mod_base = OTHER; note = 2'-fluoroadenosine-3'-phosphate
  modified_base 2: mod_base = OTHER; note = 2'-O-methylguanosine-3'-phosphate
  modified_base 3: mod_base = OTHER; note = 2'-fluoroadenosine-3'-phosphate
  modified_base 4: mod_base = OTHER; note = 2'-O-methylcytidine-3'-phosphate
  modified_base 5: mod_base = OTHER; note = 2'-fluorocytidine-3'-phosphate
  modified_base 6: mod_base = OTHER; note = 2'-O-methyluridine-3'-phosphate
  modified_base 7: mod_base = OTHER; note = 2'-fluoroguanosine-3'-phosphate
  modified_base 8: mod_base = OTHER; note = 2'-fluorouridine-3'-phosphate
  modified_base 9: mod_base = OTHER; note = 2'-fluorouridine-3'-phosphate
  modified_base 10: mod_base = OTHER; note = 2'-O-methyluridine-3'-phosphate
  modified_base 11: mod_base = OTHER; note = 2'-fluorouridine-3'-phosphate
  modified_base 12: mod_base = OTHER; note = 2'-O-methylguanosine-3'-phosphate
  modified_base 13: mod_base = OTHER; note = 2'-fluorocytidine-3'-phosphate
  modified_base 14: mod_base = OTHER; note = 2'-O-methyluridine-3'-phosphate
  modified_base 15: mod_base = OTHER; note = 2'-fluorouridine-3'-phosphate
  modified_base 16: mod_base = OTHER; note = 2'-fluorouridine-3'-phosphate
  modified_base 17: mod_base = OTHER; note = 2'-fluorouridine-3'-phosphate
  modified_base 18: mod_base = OTHER; note = 2'-O-methylguanosine-3'-phosphate
  modified_base 19: mod_base = OTHER; note = 2'-fluorouridine-3'-phosphate N-[tris(GalNAc-alkyl)-amidodecanoyl)]-4-hydroxyprolinol Hyp-(GalNAc-alkyl)3
agacctgttttgcttttgt

SEQ ID NO: 590 - RNA, 21 nt, synthetic construct
  source 1..21: mol_type = other RNA; note = Description of Artificial Sequence: Synthetic oligonucleotide
  modified_base 1: mod_base = OTHER; note = 2'-O-methyladenosine-3'-phosphate
  modified_base 2: mod_base = OTHER; note = 2'-fluorocytidine-3'-phosphate
  modified_base 3: mod_base = OTHER; note = 2'-O-methyladenosine-3'-phosphate
  modified_base 4: mod_base = OTHER; note = 2'-O-methyladenosine-3'-phosphate
  modified_base 5: mod_base = OTHER; note = 2'-O-methyladenosine-3'-phosphate
  modified_base 6: mod_base = OTHER; note = 2'-fluoroadenosine-3'-phosphate
  modified_base 7: mod_base = OTHER; note = 2'-O-methylguanosine-3'-phosphate
  modified_base 8: mod_base = OTHER; note = 2'-fluorocytidine-3'-phosphate
  modified_base 9: mod_base = OTHER; note = 2'-O-methyladenosine-3'-phosphate
  modified_base 10: mod_base = OTHER; note = 2'-fluoroadenosine-3'-phosphate
  modified_base 11: mod_base = OTHER; note = 2'-O-methyladenosine-3'-phosphate
  modified_base 12: mod_base = OTHER; note = 2'-O-methyladenosine-3'-phosphate
  modified_base 13: mod_base = OTHER; note = 2'-O-methylcytidine-3'-phosphate
  modified_base 14: mod_base = OTHER; note = 2'-fluoroadenosine-3'-phosphate
  modified_base 15: mod_base = OTHER; note = 2'-O-methylguanosine-3'-phosphate
  modified_base 16: mod_base = OTHER; note = 2'-fluoroguanosine-3'-phosphate
  modified_base 17: mod_base = OTHER; note = 2'-O-methyluridine-3'-phosphate
  modified_base 18: mod_base = OTHER; note = 2'-fluorocytidine-3'-phosphate
  modified_base 19: mod_base = OTHER; note = 2'-O-methyluridine-3'-phosphorothioate
  modified_base 20: mod_base = OTHER; note = 2'-fluoroadenosine-3'-phosphorothioate
  modified_base 21: mod_base = OTHER; note = 2'-O-methylguanosine-3'-phosphate
acaaaagcaaaacaggtctag

SEQ ID NO: 591 - RNA, 19 nt, synthetic construct
  source 1..19: mol_type = other RNA; note = Description of Artificial Sequence: Synthetic oligonucleotide
  modified_base 1: mod_base = OTHER; note = 2'-fluoroadenosine-3'-phosphate
  modified_base 2: mod_base = OTHER; note = 2'-O-methylguanosine-3'-phosphate
  modified_base 3: mod_base = OTHER; note = 2'-fluoroadenosine-3'-phosphate
  modified_base 4: mod_base = OTHER; note = 2'-O-methylcytidine-3'-phosphate
  modified_base 5: mod_base = OTHER; note = 2'-fluorocytidine-3'-phosphate
  modified_base 6: mod_base = OTHER; note = 2'-O-methyluridine-3'-phosphate
  modified_base 7: mod_base = OTHER; note = 2'-fluoroguanosine-3'-phosphate
  modified_base 8: mod_base = OTHER; note = 2'-fluorouridine-3'-phosphate
  modified_base 9: mod_base = OTHER; note = 2'-fluorouridine-3'-phosphate
  modified_base 10: mod_base = OTHER; note = 2'-O-methyluridine-3'-phosphate
  modified_base 11: mod_base = OTHER; note = 2'-fluorouridine-3'-phosphate
  modified_base 12: mod_base = OTHER; note = 2'-O-methylguanosine-3'-phosphate
  modified_base 13: mod_base = OTHER; note = 2'-fluorocytidine-3'-phosphate
  modified_base 14: mod_base = OTHER; note = 2'-fluorouridine-3'-phosphate
  modified_base 15: mod_base = OTHER; note = 2'-fluorouridine-3'-phosphate
  modified_base 16: mod_base = OTHER; note = 2'-O-methyluridine-3'-phosphate
  modified_base 17: mod_base = OTHER; note = 2'-fluorouridine-3'-phosphate
  modified_base 18: mod_base = OTHER; note = 2'-O-methylguanosine-3'-phosphate
  modified_base 19: mod_base = OTHER; note = 2'-fluorouridine-3'-phosphate N-[tris(GalNAc-alkyl)-amidodecanoyl)]-4-hydroxyprolinol Hyp-(GalNAc-alkyl)3
agacctgttttgcttttgt

SEQ ID NO: 592 - RNA, 21 nt, synthetic construct
  source 1..21: mol_type = other RNA; note = Description of Artificial Sequence: Synthetic oligonucleotide
  modified_base 1: mod_base = OTHER; note = 2'-O-methyladenosine-3'-phosphate
  modified_base 2: mod_base = OTHER; note = 2'-fluorocytidine-3'-phosphate
  modified_base 3: mod_base = OTHER; note = 2'-O-methyladenosine-3'-phosphate
  modified_base 4: mod_base = OTHER; note = 2'-fluoroadenosine-3'-phosphate
  modified_base 5: mod_base = OTHER; note = 2'-O-methyladenosine-3'-phosphate
  modified_base 6: mod_base = OTHER; note = 2'-O-methyladenosine-3'-phosphate
  modified_base 7: mod_base = OTHER; note = 2'-O-methylguanosine-3'-phosphate
  modified_base 8: mod_base = OTHER; note = 2'-fluorocytidine-3'-phosphate
  modified_base 9: mod_base = OTHER; note = 2'-O-methyladenosine-3'-phosphate
  modified_base 10: mod_base = OTHER; note = 2'-fluoroadenosine-3'-phosphate
  modified_base 11: mod_base = OTHER; note = 2'-O-methyladenosine-3'-phosphate
  modified_base 12: mod_base = OTHER; note = 2'-O-methyladenosine-3'-phosphate
  modified_base 13: mod_base = OTHER; note = 2'-O-methylcytidine-3'-phosphate
  modified_base 14: mod_base = OTHER; note = 2'-fluoroadenosine-3'-phosphate
  modified_base 15: mod_base = OTHER; note = 2'-O-methylguanosine-3'-phosphate
  modified_base 16: mod_base = OTHER; note = 2'-fluoroguanosine-3'-phosphate
  modified_base 17: mod_base = OTHER; note = 2'-O-methyluridine-3'-phosphate
  modified_base 18: mod_base = OTHER; note = 2'-fluorocytidine-3'-phosphate
  modified_base 19: mod_base = OTHER; note = 2'-O-methyluridine-3'-phosphorothioate
  modified_base 20: mod_base = OTHER; note = 2'-fluoroadenosine-3'-phosphorothioate
  modified_base 21: mod_base = OTHER; note = 2'-O-methylguanosine-3'-phosphate
acaaaagcaaaacaggtctag

SEQ ID NO: 593 - RNA, 19 nt, synthetic construct
  source 1..19: mol_type = other RNA; note = Description of Artificial Sequence: Synthetic oligonucleotide
  modified_base 1: mod_base = OTHER; note = 2'-fluoroadenosine-3'-phosphate
  modified_base 2: mod_base = OTHER; note = 2'-O-methylguanosine-3'-phosphate
  modified_base 3: mod_base = OTHER; note = 2'-fluoroadenosine-3'-phosphate
  modified_base 4: mod_base = OTHER; note = 2'-O-methylcytidine-3'-phosphate
  modified_base 5: mod_base = OTHER; note = 2'-fluorocytidine-3'-phosphate
  modified_base 6: mod_base = OTHER; note = 2'-O-methyluridine-3'-phosphate
  modified_base 7: mod_base = OTHER; note = 2'-fluoroguanosine-3'-phosphate
  modified_base 8: mod_base = OTHER; note = 2'-fluorouridine-3'-phosphate
  modified_base 9: mod_base = OTHER; note = 2'-fluorouridine-3'-phosphate
  modified_base 10: mod_base = OTHER; note = 2'-O-methyluridine-3'-phosphate
  modified_base 11: mod_base = OTHER; note = 2'-fluorouridine-3'-phosphate
  modified_base 12: mod_base = OTHER; note = 2'-fluoroguanosine-3'-phosphate
  modified_base 13: mod_base = OTHER; note = 2'-fluorocytidine-3'-phosphate
  modified_base 14: mod_base = OTHER; note = 2'-O-methyluridine-3'-phosphate
  modified_base 15: mod_base = OTHER; note = 2'-fluorouridine-3'-phosphate
  modified_base 16: mod_base = OTHER; note = 2'-O-methyluridine-3'-phosphate
  modified_base 17: mod_base = OTHER; note = 2'-fluorouridine-3'-phosphate
  modified_base 18: mod_base = OTHER; note = 2'-O-methylguanosine-3'-phosphate
  modified_base 19: mod_base = OTHER; note = 2'-fluorouridine-3'-phosphate N-[tris(GalNAc-alkyl)-amidodecanoyl)]-4-hydroxyprolinol Hyp-(GalNAc-alkyl)3
agacctgttttgcttttgt

SEQ ID NO: 594 - RNA, 21 nt, synthetic construct
  source 1..21: mol_type = other RNA; note = Description of Artificial Sequence: Synthetic oligonucleotide
  modified_base 1: mod_base = OTHER; note = 2'-O-methyladenosine-3'-phosphate
  modified_base 2: mod_base = OTHER; note = 2'-fluorocytidine-3'-phosphate
  modified_base 3: mod_base = OTHER; note = 2'-O-methyladenosine-3'-phosphate
  modified_base 4: mod_base = OTHER; note = 2'-fluoroadenosine-3'-phosphate
  modified_base 5: mod_base = OTHER; note = 2'-O-methyladenosine-3'-phosphate
  modified_base 6: mod_base = OTHER; note = 2'-fluoroadenosine-3'-phosphate
  modified_base 7: mod_base = OTHER; note = 2'-O-methylguanosine-3'-phosphate
  modified_base 8: mod_base = OTHER; note = 2'-O-methylcytidine-3'-phosphate
  modified_base 9: mod_base = OTHER; note = 2'-O-methyladenosine-3'-phosphate
  modified_base 10: mod_base = OTHER; note = 2'-fluoroadenosine-3'-phosphate
  modified_base 11: mod_base = OTHER; note = 2'-O-methyladenosine-3'-phosphate
  modified_base 12: mod_base = OTHER; note = 2'-O-methyladenosine-3'-phosphate
  modified_base 13: mod_base = OTHER; note = 2'-O-methylcytidine-3'-phosphate
  modified_base 14: mod_base = OTHER; note = 2'-fluoroadenosine-3'-phosphate
  modified_base 15: mod_base = OTHER; note = 2'-O-methylguanosine-3'-phosphate
  modified_base 16: mod_base = OTHER; note = 2'-fluoroguanosine-3'-phosphate
  modified_base 17: mod_base = OTHER; note = 2'-O-methyluridine-3'-phosphate
  modified_base 18: mod_base = OTHER; note = 2'-fluorocytidine-3'-phosphate
  modified_base 19: mod_base = OTHER; note = 2'-O-methyluridine-3'-phosphorothioate
  modified_base 20: mod_base = OTHER; note = 2'-fluoroadenosine-3'-phosphorothioate
  modified_base 21: mod_base = OTHER; note = 2'-O-methylguanosine-3'-phosphate
acaaaagcaaaacaggtctag

SEQ ID NO: 595 - RNA, 19 nt, synthetic construct
  source 1..19: mol_type = other RNA; note = Description of Artificial Sequence: Synthetic oligonucleotide
  modified_base 1: mod_base = OTHER; note = 2'-fluoroadenosine-3'-phosphate
  modified_base 2: mod_base = OTHER; note = 2'-O-methylguanosine-3'-phosphate
  modified_base 3: mod_base = OTHER; note = 2'-fluoroadenosine-3'-phosphate
  modified_base 4: mod_base = OTHER; note = 2'-O-methylcytidine-3'-phosphate
  modified_base 5: mod_base = OTHER; note = 2'-fluorocytidine-3'-phosphate
  modified_base 6: mod_base = OTHER; note = 2'-O-methyluridine-3'-phosphate
  modified_base 7: mod_base = OTHER; note = 2'-fluoroguanosine-3'-phosphate
  modified_base 8: mod_base = OTHER; note = 2'-fluorouridine-3'-phosphate
  modified_base 9: mod_base = OTHER; note = 2'-fluorouridine-3'-phosphate
  modified_base 10: mod_base = OTHER; note = 2'-fluorouridine-3'-phosphate
  modified_base 11: mod_base = OTHER; note = 2'-fluorouridine-3'-phosphate
  modified_base 12: mod_base = OTHER; note = 2'-O-methylguanosine-3'-phosphate
  modified_base 13: mod_base = OTHER; note = 2'-fluorocytidine-3'-phosphate
  modified_base 14: mod_base = OTHER; note = 2'-O-methyluridine-3'-phosphate
  modified_base 15: mod_base = OTHER; note = 2'-fluorouridine-3'-phosphate
  modified_base 16: mod_base = OTHER; note = 2'-O-methyluridine-3'-phosphate
  modified_base 17: mod_base = OTHER; note = 2'-fluorouridine-3'-phosphate
  modified_base 18: mod_base = OTHER; note = 2'-O-methylguanosine-3'-phosphate
  modified_base 19: mod_base = OTHER; note = 2'-fluorouridine-3'-phosphate N-[tris(GalNAc-alkyl)-amidodecanoyl)]-4-hydroxyprolinol Hyp-(GalNAc-alkyl)3
agacctgttttgcttttgt

SEQ ID NO: 596 - RNA, 21 nt, synthetic construct
  source 1..21: mol_type = other RNA; note = Description of Artificial Sequence: Synthetic oligonucleotide
  modified_base 1: mod_base = OTHER; note = 2'-O-methyladenosine-3'-phosphate
  modified_base 2: mod_base = OTHER; note = 2'-fluorocytidine-3'-phosphate
  modified_base 3: mod_base = OTHER; note = 2'-O-methyladenosine-3'-phosphate
  modified_base 4: mod_base = OTHER; note = 2'-fluoroadenosine-3'-phosphate
  modified_base 5: mod_base = OTHER; note = 2'-O-methyladenosine-3'-phosphate
  modified_base 6: mod_base = OTHER; note = 2'-fluoroadenosine-3'-phosphate
  modified_base 7: mod_base = OTHER; note = 2'-O-methylguanosine-3'-phosphate
  modified_base 8: mod_base = OTHER; note = 2'-fluorocytidine-3'-phosphate
  modified_base 9: mod_base = OTHER; note = 2'-O-methyladenosine-3'-phosphate
  modified_base 10: mod_base = OTHER; note = 2'-O-methyladenosine-3'-phosphate
  modified_base 11: mod_base = OTHER; note = 2'-O-methyladenosine-3'-phosphate
  modified_base 12: mod_base = OTHER; note = 2'-O-methyladenosine-3'-phosphate
  modified_base 13: mod_base = OTHER; note = 2'-O-methylcytidine-3'-phosphate
  modified_base 14: mod_base = OTHER; note = 2'-fluoroadenosine-3'-phosphate
  modified_base 15: mod_base = OTHER; note = 2'-O-methylguanosine-3'-phosphate
  modified_base 16: mod_base = OTHER; note = 2'-fluoroguanosine-3'-phosphate
  modified_base 17: mod_base = OTHER; note = 2'-O-methyluridine-3'-phosphate
  modified_base 18: mod_base = OTHER; note = 2'-fluorocytidine-3'-phosphate
  modified_base 19: mod_base = OTHER; note = 2'-O-methyluridine-3'-phosphorothioate
  modified_base 20: mod_base = OTHER; note = 2'-fluoroadenosine-3'-phosphorothioate
  modified_base 21: mod_base = OTHER; note = 2'-O-methylguanosine-3'-phosphate
acaaaagcaaaacaggtctag

SEQ ID NO: 597 - RNA, 19 nt, synthetic construct
  source 1..19: mol_type = other RNA; note = Description of Artificial Sequence: Synthetic oligonucleotide
  modified_base 1: mod_base = OTHER; note = 2'-fluoroadenosine-3'-phosphate
  modified_base 2: mod_base = OTHER; note = 2'-O-methylguanosine-3'-phosphate
  modified_base 3: mod_base = OTHER; note = 2'-fluoroadenosine-3'-phosphate
  modified_base 4: mod_base = OTHER; note = 2'-O-methylcytidine-3'-phosphate
  modified_base 5: mod_base = OTHER; note = 2'-fluorocytidine-3'-phosphate
  modified_base 6: mod_base = OTHER; note = 2'-fluorouridine-3'-phosphate
  modified_base 7: mod_base = OTHER; note = 2'-fluoroguanosine-3'-phosphate
  modified_base 8: mod_base = OTHER; note = 2'-fluorouridine-3'-phosphate
  modified_base 9: mod_base = OTHER; note = 2'-fluorouridine-3'-phosphate
  modified_base 10: mod_base = OTHER; note = 2'-O-methyluridine-3'-phosphate
  modified_base 11: mod_base = OTHER; note = 2'-fluorouridine-3'-phosphate
  modified_base 12: mod_base = OTHER; note = 2'-O-methylguanosine-3'-phosphate
  modified_base 13: mod_base = OTHER; note = 2'-fluorocytidine-3'-phosphate
  modified_base 14: mod_base = OTHER; note = 2'-O-methyluridine-3'-phosphate
  modified_base 15: mod_base = OTHER; note = 2'-fluorouridine-3'-phosphate
  modified_base 16: mod_base = OTHER; note = 2'-O-methyluridine-3'-phosphate
  modified_base 17: mod_base = OTHER; note = 2'-fluorouridine-3'-phosphate
  modified_base 18: mod_base = OTHER; note = 2'-O-methylguanosine-3'-phosphate
  modified_base 19: mod_base = OTHER; note = 2'-fluorouridine-3'-phosphate N-[tris(GalNAc-alkyl)-amidodecanoyl)]-4-hydroxyprolinol Hyp-(GalNAc-alkyl)3
agacctgttttgcttttgt

SEQ ID NO: 598 - RNA, 21 nt, synthetic construct
  source 1..21: mol_type = other RNA; note = Description of Artificial Sequence: Synthetic oligonucleotide
  modified_base 1: mod_base = OTHER; note = 2'-O-methyladenosine-3'-phosphate
  modified_base 2: mod_base = OTHER; note = 2'-fluorocytidine-3'-phosphate
  modified_base 3: mod_base = OTHER; note = 2'-O-methyladenosine-3'-phosphate
  modified_base 4: mod_base = OTHER; note = 2'-fluoroadenosine-3'-phosphate
  modified_base 5: mod_base = OTHER; note = 2'-O-methyladenosine-3'-phosphate
  modified_base 6: mod_base = OTHER; note = 2'-fluoroadenosine-3'-phosphate
  modified_base 7: mod_base = OTHER; note = 2'-O-methylguanosine-3'-phosphate
  modified_base 8: mod_base = OTHER; note = 2'-fluorocytidine-3'-phosphate
  modified_base 9: mod_base = OTHER; note = 2'-O-methyladenosine-3'-phosphate
  modified_base 10: mod_base = OTHER; note = 2'-fluoroadenosine-3'-phosphate
  modified_base 11: mod_base = OTHER; note = 2'-O-methyladenosine-3'-phosphate
  modified_base 12: mod_base = OTHER; note = 2'-O-methyladenosine-3'-phosphate
  modified_base 13: mod_base = OTHER; note = 2'-O-methylcytidine-3'-phosphate
  modified_base 14: mod_base = OTHER; note = 2'-O-methyladenosine-3'-phosphate
  modified_base 15: mod_base = OTHER; note = 2'-O-methylguanosine-3'-phosphate
  modified_base 16: mod_base = OTHER; note = 2'-fluoroguanosine-3'-phosphate
  modified_base 17: mod_base = OTHER; note = 2'-O-methyluridine-3'-phosphate
  modified_base 18: mod_base = OTHER; note = 2'-fluorocytidine-3'-phosphate
  modified_base 19: mod_base = OTHER; note = 2'-O-methyluridine-3'-phosphorothioate
  modified_base 20: mod_base = OTHER; note = 2'-fluoroadenosine-3'-phosphorothioate
  modified_base 21: mod_base = OTHER; note = 2'-O-methylguanosine-3'-phosphate
acaaaagcaaaacaggtctag

SEQ ID NO: 599 - RNA, 19 nt, synthetic construct
  source 1..19: mol_type = other RNA; note = Description of Artificial Sequence: Synthetic oligonucleotide
  modified_base 1: mod_base = OTHER; note = 2'-fluoroadenosine-3'-phosphate
  modified_base 2: mod_base = OTHER; note = 2'-O-methylguanosine-3'-phosphate
  modified_base 3: mod_base = OTHER; note = 2'-fluoroadenosine-3'-phosphate
  modified_base 4: mod_base = OTHER; note = 2'-fluorocytidine-3'-phosphate
  modified_base 5: mod_base = OTHER; note = 2'-fluorocytidine-3'-phosphate
  modified_base 6: mod_base = OTHER; note = 2'-O-methyluridine-3'-phosphate
  modified_base 7: mod_base = OTHER; note = 2'-fluoroguanosine-3'-phosphate
  modified_base 8: mod_base = OTHER; note = 2'-fluorouridine-3'-phosphate
  modified_base 9: mod_base = OTHER; note = 2'-fluorouridine-3'-phosphate
  modified_base 10: mod_base = OTHER; note = 2'-O-methyluridine-3'-phosphate
  modified_base 11: mod_base = OTHER; note = 2'-fluorouridine-3'-phosphate
  modified_base 12: mod_base = OTHER; note = 2'-O-methylguanosine-3'-phosphate
  modified_base 13: mod_base = OTHER; note = 2'-fluorocytidine-3'-phosphate
  modified_base 14: mod_base = OTHER; note = 2'-O-methyluridine-3'-phosphate
  modified_base 15: mod_base = OTHER; note = 2'-fluorouridine-3'-phosphate
  modified_base 16: mod_base = OTHER; note = 2'-O-methyluridine-3'-phosphate
  modified_base 17: mod_base = OTHER; note = 2'-fluorouridine-3'-phosphate
  modified_base 18: mod_base = OTHER; note = 2'-O-methylguanosine-3'-phosphate
  modified_base 19: mod_base = OTHER; note = 2'-fluorouridine-3'-phosphate N-[tris(GalNAc-alkyl)-amidodecanoyl)]-4-hydroxyprolinol Hyp-(GalNAc-alkyl)3
agacctgttttgcttttgt

SEQ ID NO: 600 - RNA, 21 nt, synthetic construct
  source 1..21: mol_type = other RNA; note = Description of Artificial Sequence: Synthetic oligonucleotide
  modified_base 1: mod_base = OTHER; note = 2'-O-methyladenosine-3'-phosphate
  modified_base 2: mod_base = OTHER; note = 2'-fluorocytidine-3'-phosphate
  modified_base 3: mod_base = OTHER; note = 2'-O-methyladenosine-3'-phosphate
  modified_base 4: mod_base = OTHER; note = 2'-fluoroadenosine-3'-phosphate
  modified_base 5: mod_base = OTHER; note = 2'-O-methyladenosine-3'-phosphate
  modified_base 6: mod_base = OTHER; note = 2'-fluoroadenosine-3'-phosphate
  modified_base 7: mod_base = OTHER; note = 2'-O-methylguanosine-3'-phosphate
  modified_base 8: mod_base = OTHER; note = 2'-fluorocytidine-3'-phosphate
  modified_base 9: mod_base = OTHER; note = 2'-O-methyladenosine-3'-phosphate
  modified_base 10: mod_base = OTHER; note = 2'-fluoroadenosine-3'-phosphate
  modified_base 11: mod_base = OTHER; note = 2'-O-methyladenosine-3'-phosphate
  modified_base 12: mod_base = OTHER; note = 2'-O-methyladenosine-3'-phosphate
  modified_base 13: mod_base = OTHER; note = 2'-O-methylcytidine-3'-phosphate
  modified_base 14: mod_base = OTHER; note = 2'-fluoroadenosine-3'-phosphate
  modified_base 15: mod_base = OTHER; note = 2'-O-methylguanosine-3'-phosphate
  modified_base 16: mod_base = OTHER; note = 2'-O-methylguanosine-3'-phosphate
  modified_base 17: mod_base = OTHER; note = 2'-O-methyluridine-3'-phosphate
  modified_base 18: mod_base = OTHER; note = 2'-fluorocytidine-3'-phosphate
  modified_base 19: mod_base = OTHER; note = 2'-O-methyluridine-3'-phosphorothioate
  modified_base 20: mod_base = OTHER; note = 2'-fluoroadenosine-3'-phosphorothioate
  modified_base 21: mod_base = OTHER; note = 2'-O-methylguanosine-3'-phosphate
acaaaagcaaaacaggtctag

SEQ ID NO: 601 - RNA, 19 nt, synthetic construct
  source 1..19: mol_type = other RNA; note = Description of Artificial Sequence: Synthetic oligonucleotide
  modified_base 1: mod_base = OTHER; note = 2'-fluoroadenosine-3'-phosphate
  modified_base 2: mod_base = OTHER; note = 2'-fluoroguanosine-3'-phosphate
  modified_base 3: mod_base = OTHER; note = 2'-fluoroadenosine-3'-phosphate
  modified_base 4: mod_base = OTHER; note = 2'-O-methylcytidine-3'-phosphate
  modified_base 5: mod_base = OTHER; note = 2'-fluorocytidine-3'-phosphate
  modified_base 6: mod_base = OTHER; note = 2'-O-methyluridine-3'-phosphate
  modified_base 7: mod_base = OTHER; note = 2'-fluoroguanosine-3'-phosphate
  modified_base 8: mod_base = OTHER; note = 2'-fluorouridine-3'-phosphate
  modified_base 9: mod_base = OTHER; note = 2'-fluorouridine-3'-phosphate
  modified_base 10: mod_base = OTHER; note = 2'-O-methyluridine-3'-phosphate
  modified_base 11: mod_base = OTHER; note = 2'-fluorouridine-3'-phosphate
  modified_base 12: mod_base = OTHER; note = 2'-O-methylguanosine-3'-phosphate
  modified_base 13: mod_base = OTHER; note = 2'-fluorocytidine-3'-phosphate
  modified_base 14: mod_base = OTHER; note = 2'-O-methyluridine-3'-phosphate
  modified_base 15: mod_base = OTHER; note = 2'-fluorouridine-3'-phosphate
  modified_base 16: mod_base = OTHER; note = 2'-O-methyluridine-3'-phosphate
  modified_base 17: mod_base = OTHER; note = 2'-fluorouridine-3'-phosphate
  modified_base 18: mod_base = OTHER; note = 2'-O-methylguanosine-3'-phosphate
  modified_base 19: mod_base = OTHER; note = 2'-fluorouridine-3'-phosphate N-[tris(GalNAc-alkyl)-amidodecanoyl)]-4-hydroxyprolinol Hyp-(GalNAc-alkyl)3
agacctgttttgcttttgt

SEQ ID NO: 602 - RNA, 21 nt, synthetic construct
  source 1..21: mol_type = other RNA; note = Description of Artificial Sequence: Synthetic oligonucleotide
  modified_base 1: mod_base = OTHER; note = 2'-O-methyladenosine-3'-phosphate
  modified_base 2: mod_base = OTHER; note = 2'-fluorocytidine-3'-phosphate
  modified_base 3: mod_base = OTHER; note = 2'-O-methyladenosine-3'-phosphate
  modified_base 4: mod_base = OTHER; note = 2'-fluoroadenosine-3'-phosphate
  modified_base 5: mod_base = OTHER; note = 2'-O-methyladenosine-3'-phosphate
  modified_base 6: mod_base = OTHER; note = 2'-fluoroadenosine-3'-phosphate
  modified_base 7: mod_base = OTHER; note = 2'-O-methylguanosine-3'-phosphate
  modified_base 8: mod_base = OTHER; note = 2'-fluorocytidine-3'-phosphate
  modified_base 9: mod_base = OTHER; note = 2'-O-methyladenosine-3'-phosphate
  modified_base 10: mod_base = OTHER; note = 2'-fluoroadenosine-3'-phosphate
  modified_base 11: mod_base = OTHER; note = 2'-O-methyladenosine-3'-phosphate
  modified_base 12: mod_base = OTHER; note = 2'-O-methyladenosine-3'-phosphate
  modified_base 13: mod_base = OTHER; note = 2'-O-methylcytidine-3'-phosphate
  modified_base 14: mod_base = OTHER; note = 2'-fluoroadenosine-3'-phosphate
  modified_base 15: mod_base = OTHER; note = 2'-O-methylguanosine-3'-phosphate
  modified_base 16: mod_base = OTHER; note = 2'-fluoroguanosine-3'-phosphate
  modified_base 17: mod_base = OTHER; note = 2'-O-methyluridine-3'-phosphate
  modified_base 18: mod_base = OTHER; note = 2'-O-methylcytidine-3'-phosphate
  modified_base 19: mod_base = OTHER; note = 2'-O-methyluridine-3'-phosphorothioate
  modified_base 20: mod_base = OTHER; note = 2'-fluoroadenosine-3'-phosphorothioate
  modified_base 21: mod_base = OTHER; note = 2'-O-methylguanosine-3'-phosphate
acaaaagcaaaacaggtctag

SEQ ID NO: 603 - RNA, 19 nt, synthetic construct
  source 1..19: mol_type = other RNA; note = Description of Artificial Sequence: Synthetic oligonucleotide
  modified_base 1: mod_base = OTHER; note = 2'-fluoroadenosine-3'-phosphate
  modified_base 2: mod_base = OTHER; note = 2'-O-methylguanosine-3'-phosphate
  modified_base 3: mod_base = OTHER; note = 2'-fluoroadenosine-3'-phosphate
  modified_base 4: mod_base = OTHER; note = 2'-O-methylcytidine-3'-phosphate
  modified_base 5: mod_base = OTHER; note = 2'-fluorocytidine-3'-phosphate
  modified_base 6: mod_base = OTHER; note = 2'-O-methyluridine-3'-phosphate
  modified_base 7: mod_base = OTHER; note = 2'-fluoroguanosine-3'-phosphate
  modified_base 8: mod_base = OTHER; note = 2'-fluorouridine-3'-phosphate
  modified_base 9: mod_base = OTHER; note = 2'-fluorouridine-3'-phosphate
  modified_base 10: mod_base = OTHER; note = 2'-O-methyluridine-3'-phosphate
  modified_base 11: mod_base = OTHER; note = 2'-fluorouridine-3'-phosphate
  modified_base 12: mod_base = OTHER; note = 2'-O-methylguanosine-3'-phosphate
  modified_base 13: mod_base = OTHER; note = 2'-fluorocytidine-3'-phosphate
  modified_base 14: mod_base = OTHER; note = 2'-O-methyluridine-3'-phosphate
  modified_base 15: mod_base = OTHER; note = 2'-fluorouridine-3'-phosphate
  modified_base 16: mod_base = OTHER; note = 2'-O-methyluridine-3'-phosphate
  modified_base 17: mod_base = OTHER; note = 2'-fluorouridine-3'-phosphate
  modified_base 18: mod_base = OTHER; note = 2'-O-methylguanosine-3'-phosphate
  modified_base 19: mod_base = OTHER; note = 2'-fluorouridine-3'-phosphate N-[tris(GalNAc-alkyl)-amidodecanoyl)]-4-hydroxyprolinol Hyp-(GalNAc-alkyl)3
agacctgttttgcttttgt

SEQ ID NO: 604 - RNA, 21 nt, synthetic construct
  source 1..21: mol_type = other RNA; note = Description of Artificial Sequence: Synthetic oligonucleotide
  modified_base 1: mod_base = OTHER; note = 2'-O-methyladenosine-3'-phosphate
  modified_base 2: mod_base = OTHER; note = 2'-fluorocytidine-3'-phosphate
  modified_base 3: mod_base = OTHER; note = 2'-O-methyladenosine-3'-phosphate
  modified_base 4: mod_base = OTHER; note = 2'-fluoroadenosine-3'-phosphate
  modified_base 5: mod_base = OTHER; note = 2'-O-methyladenosine-3'-phosphate
  modified_base 6: mod_base = OTHER; note = 2'-fluoroadenosine-3'-phosphate
  modified_base 7: mod_base = OTHER; note = 2'-O-methylguanosine-3'-phosphate
  modified_base 8: mod_base = OTHER; note = 2'-fluorocytidine-3'-phosphate
  modified_base 9: mod_base = OTHER; note = 2'-O-methyladenosine-3'-phosphate
  modified_base 10: mod_base = OTHER; note = 2'-fluoroadenosine-3'-phosphate
  modified_base 11: mod_base = OTHER; note = 2'-O-methyladenosine-3'-phosphate
  modified_base 12: mod_base = OTHER; note = 2'-O-methyladenosine-3'-phosphate
  modified_base 13: mod_base = OTHER; note = 2'-O-methylcytidine-3'-phosphate
  modified_base 14: mod_base = OTHER; note = 2'-fluoroadenosine-3'-phosphate
  modified_base 15: mod_base = OTHER; note = 2'-O-methylguanosine-3'-phosphate
  modified_base 16: mod_base = OTHER; note = 2'-fluoroguanosine-3'-phosphate
  modified_base 17: mod_base = OTHER; note = 2'-O-methyluridine-3'-phosphate
  modified_base 18: mod_base = OTHER; note = 2'-fluorocytidine-3'-phosphate
  modified_base 19: mod_base = OTHER; note = 2'-O-methyluridine-3'-phosphorothioate
  modified_base 20: mod_base = OTHER; note = 2'-O-methyladenosine-3'-phosphorothioate
  modified_base 21: mod_base = OTHER; note = 2'-O-methylguanosine-3'-phosphate
acaaaagcaaaacaggtctag

SEQ ID NO: 605 - RNA, 18 nt, synthetic construct
  source 1..18: mol_type = other RNA; note = Description of Artificial Sequence: Synthetic oligonucleotide
  modified_base 1: mod_base = OTHER; note = 2'-O-methylguanosine-3'-phosphate
  modified_base 2: mod_base = OTHER; note = 2'-fluoroadenosine-3'-phosphate
  modified_base 3: mod_base = OTHER; note = 2'-O-methylcytidine-3'-phosphate
  modified_base 4: mod_base = OTHER; note = 2'-fluorocytidine-3'-phosphate
  modified_base 5: mod_base = OTHER; note = 2'-O-methyluridine-3'-phosphate
  modified_base 6: mod_base = OTHER; note = 2'-fluoroguanosine-3'-phosphate
  modified_base 7: mod_base = OTHER; note = 2'-fluorouridine-3'-phosphate
  modified_base 8: mod_base = OTHER; note = 2'-fluorouridine-3'-phosphate
  modified_base 9: mod_base = OTHER; note = 2'-O-methyluridine-3'-phosphate
  modified_base 10: mod_base = OTHER; note = 2'-fluorouridine-3'-phosphate
  modified_base 11: mod_base = OTHER; note = 2'-O-methylguanosine-3'-phosphate
  modified_base 12: mod_base = OTHER; note = 2'-fluorocytidine-3'-phosphate
  modified_base 13: mod_base = OTHER; note = 2'-O-methyluridine-3'-phosphate
  modified_base 14: mod_base = OTHER; note = 2'-fluorouridine-3'-phosphate
  modified_base 15: mod_base = OTHER; note = 2'-O-methyluridine-3'-phosphate
  modified_base 16: mod_base = OTHER; note = 2'-fluorouridine-3'-phosphate
  modified_base 17: mod_base = OTHER; note = 2'-O-methylguanosine-3'-phosphate
  modified_base 18: mod_base = OTHER; note = 2'-fluorouridine-3'-phosphate N-[tris(GalNAc-alkyl)-amidodecanoyl)]-4-hydroxyprolinol Hyp-(GalNAc-alkyl)3
gacctgttttgcttttgt

SEQ ID NO: 606 - RNA, 21 nt, synthetic construct
  source 1..21: mol_type = other RNA; note = Description of Artificial Sequence: Synthetic oligonucleotide
  modified_base 1: mod_base = OTHER; note = 2'-O-methyladenosine-3'-phosphate
  modified_base 2: mod_base = OTHER; note = 2'-fluorocytidine-3'-phosphate
  modified_base 3: mod_base = OTHER; note = 2'-O-methyladenosine-3'-phosphate
  modified_base 4: mod_base = OTHER; note = 2'-fluoroadenosine-3'-phosphate
  modified_base 5: mod_base = OTHER; note = 2'-O-methyladenosine-3'-phosphate
  modified_base 6: mod_base = OTHER; note = 2'-fluoroadenosine-3'-phosphate
  modified_base 7: mod_base = OTHER; note = 2'-O-methylguanosine-3'-phosphate
  modified_base 8: mod_base = OTHER; note = 2'-fluorocytidine-3'-phosphate
  modified_base 9: mod_base = OTHER; note = 2'-O-methyladenosine-3'-phosphate
  modified_base 10: mod_base = OTHER; note = 2'-fluoroadenosine-3'-phosphate
  modified_base 11: mod_base = OTHER; note = 2'-O-methyladenosine-3'-phosphate
  modified_base 12: mod_base = OTHER; note = 2'-O-methyladenosine-3'-phosphate
  modified_base 13: mod_base = OTHER; note = 2'-O-methylcytidine-3'-phosphate
  modified_base 14: mod_base = OTHER; note = 2'-fluoroadenosine-3'-phosphate
  modified_base 15: mod_base = OTHER; note = 2'-O-methylguanosine-3'-phosphate
  modified_base 16: mod_base = OTHER; note = 2'-fluoroguanosine-3'-phosphate
  modified_base 17: mod_base = OTHER; note = 2'-O-methyluridine-3'-phosphate
  modified_base 18: mod_base = OTHER; note = 2'-fluorocytidine-3'-phosphate
  modified_base 19: mod_base = OTHER; note = 2'-O-methyladenosine-3'-phosphate
  modified_base 20: mod_base = OTHER; note = 2'-O-methyluridine-3'-phosphorothioate
  modified_base 21: mod_base = OTHER; note = 2'-O-methyladenosine-3'-phosphate
acaaaagcaaaacaggtcata

SEQ ID NO: 607 - RNA, 19 nt, synthetic construct
  source 1..19: mol_type = other RNA; note = Description of Artificial Sequence: Synthetic oligonucleotide
  modified_base 1: mod_base = OTHER; note = 2'-fluoroadenosine-3'-phosphorothioate
  modified_base 2: mod_base = OTHER; note = 2'-O-methylguanosine-3'-phosphorothioate
  modified_base 3: mod_base = OTHER; note = 2'-fluoroadenosine-3'-phosphate
  modified_base 4: mod_base = OTHER; note = 2'-O-methylcytidine-3'-phosphate
  modified_base 5: mod_base = OTHER; note = 2'-fluorocytidine-3'-phosphate
  modified_base 6: mod_base = OTHER; note = 2'-O-methyluridine-3'-phosphate
  modified_base 7: mod_base = OTHER; note = 2'-fluoroguanosine-3'-phosphate
  modified_base 8: mod_base = OTHER; note = 2'-fluorouridine-3'-phosphate
  modified_base 9: mod_base = OTHER; note = 2'-fluorouridine-3'-phosphate
  modified_base 10: mod_base = OTHER; note = 2'-O-methyluridine-3'-phosphate
  modified_base 11: mod_base = OTHER; note = 2'-fluorouridine-3'-phosphate
  modified_base 12: mod_base = OTHER; note = 2'-O-methylguanosine-3'-phosphate
  modified_base 13: mod_base = OTHER; note = 2'-fluorocytidine-3'-phosphate
  modified_base 14: mod_base = OTHER; note = 2'-O-methyluridine-3'-phosphate
  modified_base 15: mod_base = OTHER; note = 2'-fluorouridine-3'-phosphate
  modified_base 16: mod_base = OTHER; note = 2'-O-methyluridine-3'-phosphate
  modified_base 17: mod_base = OTHER; note = 2'-fluorouridine-3'-phosphate
  modified_base 18: mod_base = OTHER; note = 2'-O-methylguanosine-3'-phosphate
  modified_base 19: mod_base = OTHER; note = 2'-fluorouridine-3'-phosphate N-[tris(GalNAc-alkyl)-amidodecanoyl)]-4-hydroxyprolinol Hyp-(GalNAc-alkyl)3
agacctgttttgcttttgt

SEQ ID NO: 608 - RNA, 19 nt, synthetic construct
  source 1..19: mol_type = other RNA; note = Description of Artificial Sequence: Synthetic oligonucleotide
  modified_base 1: mod_base = OTHER; note = 2'-O-methyladenosine-3'-phosphorothioate
  modified_base 2: mod_base = OTHER; note = 2'-fluorocytidine-3'-phosphorothioate
  modified_base 3: mod_base = OTHER; note = 2'-O-methyladenosine-3'-phosphate
  modified_base 4: mod_base = OTHER; note = 2'-fluoroadenosine-3'-phosphate
  modified_base 5: mod_base = OTHER; note = 2'-O-methyladenosine-3'-phosphate
  modified_base 6: mod_base = OTHER; note = 2'-fluoroadenosine-3'-phosphate
  modified_base 7: mod_base = OTHER; note = 2'-O-methylguanosine-3'-phosphate
  modified_base 8: mod_base = OTHER; note = 2'-fluorocytidine-3'-phosphate
  modified_base 9: mod_base = OTHER; note = 2'-O-methyladenosine-3'-phosphate
  modified_base 10: mod_base = OTHER; note = 2'-fluoroadenosine-3'-phosphate
  modified_base 11: mod_base = OTHER; note = 2'-O-methyladenosine-3'-phosphate
  modified_base 12: mod_base = OTHER; note = 2'-O-methyladenosine-3'-phosphate
  modified_base 13: mod_base = OTHER; note = 2'-O-methylcytidine-3'-phosphate
  modified_base 14: mod_base = OTHER; note = 2'-fluoroadenosine-3'-phosphate
  modified_base 15: mod_base = OTHER; note = 2'-O-methylguanosine-3'-phosphate
  modified_base 16: mod_base = OTHER; note = 2'-fluoroguanosine-3'-phosphate
  modified_base 17: mod_base = OTHER; note = 2'-O-methyluridine-3'-phosphorothioate
  modified_base 18: mod_base = OTHER; note = 2'-fluorocytidine-3'-phosphorothioate
  modified_base 19: mod_base = OTHER; note = 2'-O-methyluridine-3'-phosphate
acaaaagcaaaacaggtct

SEQ ID NO: 609 - RNA, 18 nt, synthetic construct
  source 1..18: mol_type = other RNA; note = Description of Artificial Sequence: Synthetic oligonucleotide
  modified_base 1: mod_base = OTHER; note = 2'-O-methylguanosine-3'-phosphorothioate
  modified_base 2: mod_base = OTHER; note = 2'-fluoroadenosine-3'-phosphorothioate
  modified_base 3: mod_base = OTHER; note = 2'-O-methylcytidine-3'-phosphate
  modified_base 4: mod_base = OTHER; note = 2'-fluorocytidine-3'-phosphate
  modified_base 5: mod_base = OTHER; note = 2'-O-methyluridine-3'-phosphate
  modified_base 6: mod_base = OTHER; note = 2'-fluoroguanosine-3'-phosphate
  modified_base 7: mod_base = OTHER; note = 2'-fluorouridine-3'-phosphate
  modified_base 8: mod_base = OTHER; note = 2'-fluorouridine-3'-phosphate
  modified_base 9: mod_base = OTHER; note = 2'-O-methyluridine-3'-phosphate
  modified_base 10: mod_base = OTHER; note = 2'-fluorouridine-3'-phosphate
  modified_base 11: mod_base = OTHER; note = 2'-O-methylguanosine-3'-phosphate
  modified_base 12: mod_base = OTHER; note = 2'-fluorocytidine-3'-phosphate
  modified_base 13: mod_base = OTHER; note = 2'-O-methyluridine-3'-phosphate
  modified_base 14: mod_base = OTHER; note = 2'-fluorouridine-3'-phosphate
  modified_base 15: mod_base = OTHER; note = 2'-O-methyluridine-3'-phosphate
  modified_base 16: mod_base = OTHER; note = 2'-fluorouridine-3'-phosphate
  modified_base 17: mod_base = OTHER; note = 2'-O-methylguanosine-3'-phosphate
  modified_base 18: mod_base = OTHER; note = 2'-fluorouridine-3'-phosphate N-[tris(GalNAc-alkyl)-amidodecanoyl)]-4-hydroxyprolinol Hyp-(GalNAc-alkyl)3
gacctgttttgcttttgt

SEQ ID NO: 610 - RNA, 19 nt, synthetic construct
  source 1..19: mol_type = other RNA; note = Description of Artificial Sequence: Synthetic oligonucleotide
  modified_base 1: mod_base = OTHER; note = 2'-O-methyladenosine-3'-phosphorothioate
  modified_base 2: mod_base = OTHER; note = 2'-fluorocytidine-3'-phosphorothioate
  modified_base 3: mod_base = OTHER; note = 2'-O-methyladenosine-3'-phosphate
  modified_base 4: mod_base = OTHER; note = 2'-fluoroadenosine-3'-phosphate
  modified_base 5: mod_base = OTHER; note = 2'-O-methyladenosine-3'-phosphate
  modified_base 6: mod_base = OTHER; note = 2'-fluoroadenosine-3'-phosphate
  modified_base 7: mod_base = OTHER; note = 2'-O-methylguanosine-3'-phosphate
  modified_base 8: mod_base = OTHER; note = 2'-fluorocytidine-3'-phosphate
  modified_base 9: mod_base = OTHER; note = 2'-O-methyladenosine-3'-phosphate
  modified_base 10: mod_base = OTHER; note = 2'-fluoroadenosine-3'-phosphate
  modified_base 11: mod_base = OTHER; note = 2'-O-methyladenosine-3'-phosphate
  modified_base 12: mod_base = OTHER; note = 2'-O-methyladenosine-3'-phosphate
  modified_base 13: mod_base = OTHER; note = 2'-O-methylcytidine-3'-phosphate
  modified_base 14: mod_base = OTHER; note = 2'-fluoroadenosine-3'-phosphate
  modified_base 15: mod_base = OTHER; note = 2'-O-methylguanosine-3'-phosphate
  modified_base 16: mod_base = OTHER; note = 2'-fluoroguanosine-3'-phosphate
  modified_base 17: mod_base = OTHER; note = 2'-O-methyluridine-3'-phosphorothioate
  modified_base 18: mod_base = OTHER; note = 2'-fluorocytidine-3'-phosphorothioate
  modified_base 19: mod_base = OTHER; note = 2'-O-methyluridine-3'-phosphate
acaaaagcaaaacaggtct

SEQ ID NO: 611 - RNA, 21 nt, synthetic construct
  source 1..21: mol_type = other RNA; note = Description of Artificial Sequence: Synthetic oligonucleotide
  modified_base 1: mod_base = OTHER; note = 2'-fluorouridine-3'-phosphate
  modified_base 2: mod_base = OTHER; note = 2'-O-methyluridine-3'-phosphate
  modified_base 3: mod_base = OTHER; note = 2'-fluorouridine-3'-phosphate
  modified_base 4: mod_base = OTHER; note = 2'-O-methyluridine-3'-phosphate
  modified_base 5: mod_base = OTHER; note = 2'-fluoroguanosine-3'-phosphate
  modified_base 6: mod_base = OTHER; note = 2'-O-methyluridine-3'-phosphate
  modified_base 7: mod_base = OTHER; note = 2'-fluoroadenosine-3'-phosphate
  modified_base 8: mod_base = OTHER; note = 2'-O-methyladenosine-3'-phosphate
  modified_base 9: mod_base = OTHER; note = 2'-fluorocytidine-3'-phosphate
  modified_base 10: mod_base = OTHER; note = 2'-fluorouridine-3'-phosphate
  modified_base 11: mod_base = OTHER; note = 2'-fluorouridine-3'-phosphate
  modified_base 12: mod_base = OTHER; note = 2'-O-methylguanosine-3'-phosphate
  modified_base 13: mod_base = OTHER; note = 2'-fluoroadenosine-3'-phosphate
  modified_base 14: mod_base = OTHER; note = 2'-O-methyladenosine-3'-phosphate
  modified_base 15: mod_base = OTHER; note = 2'-fluoroguanosine-3'-phosphate
  modified_base 16: mod_base = OTHER; note = 2'-O-methyladenosine-3'-phosphate
  modified_base 17: mod_base = OTHER; note = 2'-fluorouridine-3'-phosphate
  modified_base 18: mod_base = OTHER; note = 2'-O-methyladenosine-3'-phosphate
  modified_base 19: mod_base = OTHER; note = 2'-fluorouridine-3'-phosphate
  modified_base 20: mod_base = OTHER; note = 2'-O-methyluridine-3'-phosphate
  modified_base 21: mod_base = OTHER; note = 2'-fluorouridine-3'-phosphate N-[tris(GalNAc-alkyl)-amidodecanoyl)]-4-hydroxyprolinol Hyp-(GalNAc-alkyl)3
ttttgtaacttgaagatattt

SEQ ID NO: 612 - RNA, 23 nt, synthetic construct
  source 1..23: mol_type = other RNA; note = Description of Artificial Sequence: Synthetic oligonucleotide
  modified_base 1: mod_base = OTHER; note = 2'-O-methyladenosine-3'-phosphate
  modified_base 2: mod_base = OTHER; note = 2'-fluoroadenosine-3'-phosphate
  modified_base 3: mod_base = OTHER; note = 2'-O-methyladenosine-3'-phosphate
  modified_base 4: mod_base = OTHER; note = 2'-fluorouridine-3'-phosphate
  modified_base 5: mod_base = OTHER; note = 2'-O-methyladenosine-3'-phosphate
  modified_base 6: mod_base = OTHER; note = 2'-fluorouridine-3'-phosphate
  modified_base 7: mod_base = OTHER; note = 2'-O-methylcytidine-3'-phosphate
  modified_base 8: mod_base = OTHER; note = 2'-fluorouridine-3'-phosphate
  modified_base 9: mod_base = OTHER; note = 2'-O-methyluridine-3'-phosphate
  modified_base 10: mod_base = OTHER; note = 2'-fluorocytidine-3'-phosphate
  modified_base 11: mod_base = OTHER; note = 2'-O-methyladenosine-3'-phosphate
  modified_base 12: mod_base = OTHER; note = 2'-O-methyladenosine-3'-phosphate
  modified_base 13: mod_base = OTHER; note = 2'-O-methylguanosine-3'-phosphate
  modified_base 14: mod_base = OTHER; note = 2'-fluorouridine-3'-phosphate
  modified_base 15: mod_base = OTHER; note = 2'-O-methyluridine-3'-phosphate
  modified_base 16: mod_base = OTHER; note = 2'-fluoroadenosine-3'-phosphate
  modified_base 17: mod_base = OTHER; note = 2'-O-methylcytidine-3'-phosphate
  modified_base 18: mod_base = OTHER; note = 2'-fluoroadenosine-3'-phosphate
  modified_base 19: mod_base = OTHER; note = 2'-O-methyladenosine-3'-phosphate
  modified_base 20: mod_base = OTHER; note = 2'-fluoroadenosine-3'-phosphate
  modified_base 21: mod_base = OTHER; note = 2'-O-methyladenosine-3'-phosphorothioate
  modified_base 22: mod_base = OTHER; note = 2'-fluoroguanosine-3'-phosphorothioate
  modified_base 23: mod_base = OTHER; note = 2'-O-methylcytidine-3'-phosphate
aaatatcttcaagttacaaaagc

SEQ ID NO: 613 - RNA, 21 nt, synthetic construct
  source 1..21: mol_type = other RNA; note = Description of Artificial Sequence: Synthetic oligonucleotide
  modified_base 1: mod_base = OTHER; note = 2'-fluorouridine-3'-phosphate
  modified_base 2: mod_base = OTHER; note = 2'-O-methyluridine-3'-phosphate
  modified_base 3: mod_base = OTHER; note = 2'-fluorouridine-3'-phosphate
  modified_base 4: mod_base = OTHER; note = 2'-O-methylguanosine-3'-phosphate
  modified_base 5: mod_base = OTHER; note = 2'-fluorouridine-3'-phosphate
  modified_base 6: mod_base = OTHER; note = 2'-O-methyladenosine-3'-phosphate
  modified_base 7: mod_base = OTHER; note = 2'-fluoroadenosine-3'-phosphate
  modified_base 8: mod_base = OTHER; note = 2'-O-methylcytidine-3'-phosphate
  modified_base 9: mod_base = OTHER; note = 2'-fluorouridine-3'-phosphate
  modified_base 10: mod_base = OTHER; note = 2'-fluorouridine-3'-phosphate
  modified_base 11: mod_base = OTHER; note = 2'-fluoroguanosine-3'-phosphate
  modified_base 12: mod_base = OTHER; note = 2'-O-methyladenosine-3'-phosphate
  modified_base 13: mod_base = OTHER; note = 2'-fluoroadenosine-3'-phosphate
  modified_base 14: mod_base = OTHER; note = 2'-O-methylguanosine-3'-phosphate
  modified_base 15: mod_base = OTHER; note = 2'-fluoroadenosine-3'-phosphate
  modified_base 16: mod_base = OTHER; note = 2'-O-methyluridine-3'-phosphate
  modified_base 17: mod_base = OTHER; note = 2'-fluoroadenosine-3'-phosphate
  modified_base 18: mod_base = OTHER; note = 2'-O-methyluridine-3'-phosphate
  modified_base 19: mod_base = OTHER; note = 2'-fluorouridine-3'-phosphate
  modified_base 20: mod_base = OTHER; note = 2'-O-methyluridine-3'-phosphate
  modified_base 21: mod_base = OTHER; note = 2'-fluoroadenosine-3'-phosphate N-[tris(GalNAc-alkyl)-amidodecanoyl)]-4-hydroxyprolinol Hyp-(GalNAc-alkyl)3
tttgtaacttgaagatattta

SEQ ID NO: 614 - RNA, 23 nt, synthetic construct
  source 1..23: mol_type = other RNA; note = Description of Artificial Sequence: Synthetic oligonucleotide
  modified_base 1: mod_base = OTHER; note = 2'-O-methyluridine-3'-phosphate
  modified_base 2: mod_base = OTHER; note = 2'-fluoroadenosine-3'-phosphate
  modified_base 3: mod_base = OTHER; note = 2'-O-methyladenosine-3'-phosphate
  modified_base 4: mod_base = OTHER; note = 2'-fluoroadenosine-3'-phosphate
  modified_base 5: mod_base = OTHER; note = 2'-O-methyluridine-3'-phosphate
  modified_base 6: mod_base = OTHER; note = 2'-fluoroadenosine-3'-phosphate
  modified_base 7: mod_base = OTHER; note = 2'-O-methyluridine-3'-phosphate
  modified_base 8: mod_base = OTHER; note = 2'-fluorocytidine-3'-phosphate
  modified_base 9: mod_base = OTHER; note = 2'-O-methyluridine-3'-phosphate
  modified_base 10: mod_base = OTHER; note = 2'-fluorouridine-3'-phosphate
  modified_base 11: mod_base = OTHER; note = 2'-O-methylcytidine-3'-phosphate
  modified_base 12: mod_base = OTHER; note = 2'-O-methyladenosine-3'-phosphate
  modified_base 13: mod_base = OTHER; note = 2'-O-methyladenosine-3'-phosphate
  modified_base 14: mod_base = OTHER; note = 2'-fluoroguanosine-3'-phosphate
  modified_base 15: mod_base = OTHER; note = 2'-O-methyluridine-3'-phosphate
  modified_base 16: mod_base = OTHER; note = 2'-fluorouridine-3'-phosphate
  modified_base 17: mod_base = OTHER; note = 2'-O-methyladenosine-3'-phosphate
  modified_base 18: mod_base = OTHER; note = 2'-fluorocytidine-3'-phosphate
  modified_base 19: mod_base = OTHER; note = 2'-O-methyladenosine-3'-phosphate
  modified_base 20: mod_base = OTHER; note = 2'-fluoroadenosine-3'-phosphate
  modified_base 21: mod_base = OTHER; note = 2'-O-methyladenosine-3'-phosphorothioate
  modified_base 22: mod_base = OTHER; note = 2'-fluoroadenosine-3'-phosphorothioate
  modified_base 23: mod_base = OTHER; note = 2'-O-methylguanosine-3'-phosphate
taaatatcttcaagttacaaaag

SEQ ID NO: 615 - RNA, 21 nt, synthetic construct
  source 1..21: mol_type = other RNA; note = Description of Artificial Sequence: Synthetic oligonucleotide
  modified_base 1: mod_base = OTHER; note = 2'-fluorouridine-3'-phosphate
  modified_base 2: mod_base = OTHER; note = 2'-O-methyluridine-3'-phosphate
  modified_base 3: mod_base = OTHER; note = 2'-fluoroguanosine-3'-phosphate
  modified_base 4: mod_base = OTHER; note = 2'-O-methyluridine-3'-phosphate
  modified_base 5: mod_base = OTHER; note = 2'-fluoroadenosine-3'-phosphate
  modified_base 6: mod_base = OTHER; note = 2'-O-methyladenosine-3'-phosphate
  modified_base 7: mod_base = OTHER; note = 2'-fluorocytidine-3'-phosphate
  modified_base 8: mod_base = OTHER; note = 2'-O-methyluridine-3'-phosphate
  modified_base 9: mod_base = OTHER; note = 2'-fluorouridine-3'-phosphate
  modified_base 10: mod_base = OTHER; note = 2'-fluoroguanosine-3'-phosphate
  modified_base 11: mod_base = OTHER; note = 2'-fluoroadenosine-3'-phosphate
  modified_base 12: mod_base = OTHER; note = 2'-O-methyladenosine-3'-phosphate
  modified_base 13: mod_base = OTHER; note = 2'-fluoroguanosine-3'-phosphate
  modified_base 14: mod_base = OTHER; note = 2'-O-methyladenosine-3'-phosphate
  modified_base 15: mod_base = OTHER; note = 2'-fluorouridine-3'-phosphate
  modified_base 16: mod_base = OTHER; note = 2'-O-methyladenosine-3'-phosphate
  modified_base 17: mod_base = OTHER; note = 2'-fluorouridine-3'-phosphate
  modified_base 18: mod_base = OTHER; note = 2'-O-methyluridine-3'-phosphate
  modified_base 19: mod_base = OTHER; note = 2'-fluorouridine-3'-phosphate
  modified_base 20: mod_base = OTHER; note = 2'-O-methyladenosine-3'-phosphate
  modified_base 21: mod_base = OTHER; note = 2'-fluorouridine-3'-phosphate N-[tris(GalNAc-alkyl)-amidodecanoyl)]-4-hydroxyprolinol Hyp-(GalNAc-alkyl)3
ttgtaacttgaagatatttat

SEQ ID NO: 616 - RNA, 23 nt, synthetic construct
  source 1..23: mol_type = other RNA; note = Description of Artificial Sequence: Synthetic oligonucleotide
  modified_base 1: mod_base = OTHER; note = 2'-O-methyladenosine-3'-phosphate
  modified_base 2: mod_base = OTHER; note = 2'-fluorouridine-3'-phosphate
  modified_base 3: mod_base = OTHER; note = 2'-O-methyladenosine-3'-phosphate
  modified_base 4: mod_base = OTHER; note = 2'-fluoroadenosine-3'-phosphate
  modified_base 5: mod_base = OTHER; note = 2'-O-methyladenosine-3'-phosphate
  modified_base 6: mod_base = OTHER; note = 2'-fluorouridine-3'-phosphate
  modified_base 7: mod_base = OTHER; note = 2'-O-methyladenosine-3'-phosphate
  modified_base 8: mod_base = OTHER; note = 2'-fluorouridine-3'-phosphate
  modified_base 9: mod_base = OTHER; note = 2'-O-methylcytidine-3'-phosphate
  modified_base 10: mod_base = OTHER; note = 2'-fluorouridine-3'-phosphate
  modified_base 11: mod_base = OTHER; note = 2'-O-methyluridine-3'-phosphate
  modified_base 12: mod_base = OTHER; note = 2'-O-methylcytidine-3'-phosphate
  modified_base 13: mod_base = OTHER; note = 2'-O-methyladenosine-3'-phosphate
  modified_base 14: mod_base = OTHER; note = 2'-fluoroadenosine-3'-phosphate
  modified_base 15: mod_base = OTHER; note = 2'-O-methylguanosine-3'-phosphate
  modified_base 16: mod_base = OTHER; note = 2'-fluorouridine-3'-phosphate
  modified_base 17: mod_base = OTHER; note = 2'-O-methyluridine-3'-phosphate
  modified_base 18: mod_base = OTHER; note = 2'-fluoroadenosine-3'-phosphate
  modified_base 19: mod_base = OTHER; note = 2'-O-methylcytidine-3'-phosphate
  modified_base 20: mod_base = OTHER; note = 2'-fluoroadenosine-3'-phosphate
  modified_base 21: mod_base = OTHER; note = 2'-O-methyladenosine-3'-phosphorothioate
  modified_base 22: mod_base = OTHER; note = 2'-fluoroadenosine-3'-phosphorothioate
  modified_base 23: mod_base = OTHER; note = 2'-O-methyladenosine-3'-phosphate
ataaatatcttcaagttacaaaa

SEQ ID NO: 617 - RNA, 21 nt, synthetic construct
  source 1..21: mol_type = other RNA; note = Description of Artificial Sequence: Synthetic oligonucleotide
  modified_base 1: mod_base = OTHER; note = 2'-fluorouridine-3'-phosphate
  modified_base 2: mod_base = OTHER; note = 2'-O-methylguanosine-3'-phosphate
  modified_base 3: mod_base = OTHER; note = 2'-fluorouridine-3'-phosphate
  modified_base 4: mod_base = OTHER; note = 2'-O-methyladenosine-3'-phosphate
  modified_base 5: mod_base = OTHER; note = 2'-fluoroadenosine-3'-phosphate
  modified_base 6: mod_base = OTHER; note = 2'-O-methylcytidine-3'-phosphate
  modified_base 7: mod_base = OTHER; note = 2'-fluorouridine-3'-phosphate
  modified_base 8: mod_base = OTHER; note = 2'-O-methyluridine-3'-phosphate
  modified_base 9: mod_base = OTHER; note = 2'-fluoroguanosine-3'-phosphate
  modified_base 10: mod_base = OTHER; note = 2'-fluoroadenosine-3'-phosphate
  modified_base 11: mod_base = OTHER; note = 2'-fluoroadenosine-3'-phosphate
  modified_base 12: mod_base = OTHER; note = 2'-O-methylguanosine-3'-phosphate
  modified_base 13: mod_base = OTHER; note = 2'-fluoroadenosine-3'-phosphate
  modified_base 14: mod_base = OTHER; note = 2'-O-methyluridine-3'-phosphate
  modified_base 15: mod_base = OTHER; note = 2'-fluoroadenosine-3'-phosphate
  modified_base 16: mod_base = OTHER; note = 2'-O-methyluridine-3'-phosphate
  modified_base 17: mod_base = OTHER; note = 2'-fluorouridine-3'-phosphate
  modified_base 18: mod_base = OTHER; note = 2'-O-methyluridine-3'-phosphate
  modified_base 19: mod_base = OTHER; note = 2'-fluoroadenosine-3'-phosphate
  modified_base 20: mod_base = OTHER; note = 2'-O-methyluridine-3'-phosphate
  modified_base 21: mod_base = OTHER; note = 2'-fluorouridine-3'-phosphate N-[tris(GalNAc-alkyl)-amidodecanoyl)]-4-hydroxyprolinol Hyp-(GalNAc-alkyl)3
tgtaacttgaagatatttatt

SEQ ID NO: 618 - RNA, 23 nt, synthetic construct
  source 1..23: mol_type = other RNA; note = Description of Artificial Sequence: Synthetic oligonucleotide
  modified_base 1: mod_base = OTHER; note = 2'-O-methyladenosine-3'-phosphate
  modified_base 2: mod_base = OTHER; note = 2'-fluoroadenosine-3'-phosphate
  modified_base 3: mod_base = OTHER; note = 2'-O-methyluridine-3'-phosphate
  modified_base 4: mod_base = OTHER; note = 2'-fluoroadenosine-3'-phosphate
  modified_base 5: mod_base = OTHER; note = 2'-O-methyladenosine-3'-phosphate
  modified_base 6: mod_base = OTHER; note = 2'-fluoroadenosine-3'-phosphate
  modified_base 7: mod_base = OTHER; note = 2'-O-methyluridine-3'-phosphate
  modified_base 8: mod_base = OTHER; note = 2'-fluoroadenosine-3'-phosphate
  modified_base 9: mod_base = OTHER; note = 2'-O-methyluridine-3'-phosphate
  modified_base 10: mod_base = OTHER; note = 2'-fluorocytidine-3'-phosphate
  modified_base 11: mod_base = OTHER; note = 2'-O-methyluridine-3'-phosphate
  modified_base 12: mod_base = OTHER; note = 2'-O-methyluridine-3'-phosphate
  modified_base 13: mod_base = OTHER; note = 2'-O-methylcytidine-3'-phosphate
  modified_base 14: mod_base = OTHER; note = 2'-fluoroadenosine-3'-phosphate
  modified_base 15: mod_base = OTHER; note = 2'-O-methyladenosine-3'-phosphate
  modified_base 16: mod_base = OTHER; note = 2'-fluoroguanosine-3'-phosphate
  modified_base 17: mod_base = OTHER; note = 2'-O-methyluridine-3'-phosphate
  modified_base 18: mod_base = OTHER; note = 2'-fluorouridine-3'-phosphate
  modified_base 19: mod_base = OTHER; note = 2'-O-methyladenosine-3'-phosphate
  modified_base 20: mod_base = OTHER; note = 2'-fluorocytidine-3'-phosphate
  modified_base 21: mod_base = OTHER; note = 2'-O-methyladenosine-3'-phosphorothioate
  modified_base 22: mod_base = OTHER; note = 2'-fluoroadenosine-3'-phosphorothioate
  modified_base 23: mod_base = OTHER; note = 2'-O-methyladenosine-3'-phosphate
aataaatatcttcaagttacaaa

SEQ ID NO: 619 - RNA, 21 nt, synthetic construct
  source 1..21: mol_type = other RNA; note = Description of Artificial Sequence: Synthetic oligonucleotide
  modified_base 1: mod_base = OTHER; note = 2'-fluoroguanosine-3'-phosphate
  modified_base 2: mod_base = OTHER; note = 2'-O-methyluridine-3'-phosphate
  modified_base 3: mod_base = OTHER; note = 2'-fluoroadenosine-3'-phosphate
  modified_base 4: mod_base = OTHER; note = 2'-O-methyladenosine-3'-phosphate
  modified_base 5: mod_base = OTHER; note = 2'-fluorocytidine-3'-phosphate
  modified_base 6: mod_base = OTHER; note = 2'-O-methyluridine-3'-phosphate
  modified_base 7: mod_base = OTHER; note = 2'-fluorouridine-3'-phosphate
  modified_base 8: mod_base = OTHER; note = 2'-O-methylguanosine-3'-phosphate
  modified_base 9: mod_base = OTHER; note = 2'-fluoroadenosine-3'-phosphate
  modified_base 10: mod_base = OTHER; note = 2'-fluoroadenosine-3'-phosphate
  modified_base 11: mod_base = OTHER; note = 2'-fluoroguanosine-3'-phosphate
  modified_base 12: mod_base = OTHER; note = 2'-O-methyladenosine-3'-phosphate
  modified_base 13: mod_base = OTHER; note = 2'-fluorouridine-3'-phosphate
  modified_base 14: mod_base = OTHER; note = 2'-O-methyladenosine-3'-phosphate
  modified_base 15: mod_base = OTHER; note = 2'-fluorouridine-3'-phosphate
  modified_base 16: mod_base = OTHER; note = 2'-O-methyluridine-3'-phosphate
  modified_base 17: mod_base = OTHER; note = 2'-fluorouridine-3'-phosphate
  modified_base 18: mod_base = OTHER; note = 2'-O-methyladenosine-3'-phosphate
  modified_base 19: mod_base = OTHER; note = 2'-fluorouridine-3'-phosphate
  modified_base 20: mod_base = OTHER; note = 2'-O-methyluridine-3'-phosphate
  modified_base 21: mod_base = OTHER; note = 2'-fluorouridine-3'-phosphate N-[tris(GalNAc-alkyl)-amidodecanoyl)]-4-hydroxyprolinol Hyp-(GalNAc-alkyl)3
gtaacttgaagatatttattt

SEQ ID NO: 620 - RNA, 23 nt, synthetic construct
  source 1..23: mol_type = other RNA; note = Description of Artificial Sequence: Synthetic oligonucleotide
  modified_base 1: mod_base = OTHER; note = 2'-O-methyladenosine-3'-phosphate
  modified_base 2: mod_base = OTHER; note = 2'-fluoroadenosine-3'-phosphate
  modified_base 3: mod_base = OTHER; note = 2'-O-methyladenosine-3'-phosphate
  modified_base 4: mod_base = OTHER; note = 2'-fluorouridine-3'-phosphate
  modified_base 5: mod_base = OTHER; note = 2'-O-methyladenosine-3'-phosphate
  modified_base 6: mod_base = OTHER; note = 2'-fluoroadenosine-3'-phosphate
  modified_base 7: mod_base = OTHER; note = 2'-O-methyladenosine-3'-phosphate
  modified_base 8: mod_base = OTHER; note = 2'-fluorouridine-3'-phosphate
  modified_base 9: mod_base = OTHER; note = 2'-O-methyladenosine-3'-phosphate
  modified_base 10: mod_base = OTHER; note = 2'-fluorouridine-3'-phosphate
  modified_base 11: mod_base = OTHER; note = 2'-O-methylcytidine-3'-phosphate
  modified_base 12: mod_base = OTHER; note = 2'-O-methyluridine-3'-phosphate
  modified_base 13: mod_base = OTHER; note = 2'-O-methyluridine-3'-phosphate
  modified_base 14: mod_base = OTHER; note = 2'-fluorocytidine-3'-phosphate
  modified_base 15: mod_base = OTHER; note = 2'-O-methyladenosine-3'-phosphate
  modified_base 16: mod_base = OTHER; note = 2'-fluoroadenosine-3'-phosphate
  modified_base 17: mod_base = OTHER; note = 2'-O-methylguanosine-3'-phosphate
  modified_base 18: mod_base = OTHER; note = 2'-fluorouridine-3'-phosphate
  modified_base 19: mod_base = OTHER; note = 2'-O-methyluridine-3'-phosphate
  modified_base 20: mod_base = OTHER; note = 2'-fluoroadenosine-3'-phosphate
  modified_base 21: mod_base = OTHER; note = 2'-O-methylcytidine-3'-phosphorothioate
  modified_base 22: mod_base = OTHER; note = 2'-fluoroadenosine-3'-phosphorothioate
  modified_base 23: mod_base = OTHER; note = 2'-O-methyladenosine-3'-phosphate
aaataaatatcttcaagttacaa

SEQ ID NO: 621 - RNA, 21 nt, synthetic construct
  source 1..21: mol_type = other RNA; note = Description of Artificial Sequence: Synthetic oligonucleotide
  modified_base 1: mod_base = OTHER; note = 2'-fluorocytidine-3'-phosphorothioate
  modified_base 2: mod_base = OTHER; note = 2'-O-methyluridine-3'-phosphorothioate
  modified_base 3: mod_base = OTHER; note = 2'-fluoroadenosine-3'-phosphate
  modified_base 4: mod_base = OTHER; note = 2'-O-methylguanosine-3'-phosphate
  modified_base 5: mod_base = OTHER; note = 2'-fluoroadenosine-3'-phosphate
  modified_base 6: mod_base = OTHER; note = 2'-O-methylcytidine-3'-phosphate
  modified_base 7: mod_base = OTHER; note = 2'-fluorocytidine-3'-phosphate
  modified_base 8: mod_base = OTHER; note = 2'-O-methyluridine-3'-phosphate
  modified_base 9: mod_base = OTHER; note = 2'-fluoroguanosine-3'-phosphate
  modified_base 10: mod_base = OTHER; note = 2'-fluorouridine-3'-phosphate
  modified_base 11: mod_base = OTHER; note = 2'-fluorouridine-3'-phosphate
  modified_base 12: mod_base = OTHER; note = 2'-O-methyluridine-3'-phosphate
  modified_base 13: mod_base = OTHER; note = 2'-fluorouridine-3'-phosphate
  modified_base 14: mod_base = OTHER; note = 2'-O-methylguanosine-3'-phosphate
  modified_base 15: mod_base = OTHER; note = 2'-fluorocytidine-3'-phosphate
  modified_base 16: mod_base = OTHER; note = 2'-O-methyluridine-3'-phosphate
  modified_base 17: mod_base = OTHER; note = 2'-fluorouridine-3'-phosphate
  modified_base 18: mod_base = OTHER; note = 2'-O-methyluridine-3'-phosphate
  modified_base 19: mod_base = OTHER; note = 2'-fluorouridine-3'-phosphate
  modified_base 20: mod_base = OTHER; note = 2'-O-methylguanosine-3'-phosphate
  modified_base 21: mod_base = OTHER; note = 2'-fluorouridine-3'-phosphate N-[tris(GalNAc-alkyl)-amidodecanoyl)]-4-hydroxyprolinol Hyp-(GalNAc-alkyl)3
ctagacctgttttgcttttgt

SEQ ID NO: 622 - RNA, 23 nt, synthetic construct
  source 1..23: mol_type = other RNA; note = Description of Artificial Sequence: Synthetic oligonucleotide
  modified_base 1: mod_base = OTHER; note = 2'-O-methyladenosine-3'-phosphorothioate
  modified_base 2: mod_base = OTHER; note = 2'-fluorocytidine-3'-phosphorothioate
  modified_base 3: mod_base = OTHER; note = 2'-O-methyladenosine-3'-phosphate
  modified_base 4: mod_base = OTHER; note = 2'-fluoroadenosine-3'-phosphate
  modified_base 5: mod_base = OTHER; note = 2'-O-methyladenosine-3'-phosphate
  modified_base 6: mod_base = OTHER; note = 2'-fluoroadenosine-3'-phosphate
  modified_base 7: mod_base = OTHER; note = 2'-O-methylguanosine-3'-phosphate
  modified_base 8: mod_base = OTHER; note = 2'-fluorocytidine-3'-phosphate
  modified_base 9: mod_base = OTHER; note = 2'-O-methyladenosine-3'-phosphate
  modified_base 10: mod_base = OTHER; note = 2'-fluoroadenosine-3'-phosphate
  modified_base 11: mod_base = OTHER; note = 2'-O-methyladenosine-3'-phosphate
  modified_base 12: mod_base = OTHER; note = 2'-O-methyladenosine-3'-phosphate
  modified_base 13: mod_base = OTHER; note = 2'-O-methylcytidine-3'-phosphate
  modified_base 14: mod_base = OTHER; note = 2'-fluoroadenosine-3'-phosphate
  modified_base 15: mod_base = OTHER; note = 2'-O-methylguanosine-3'-phosphate
  modified_base 16: mod_base = OTHER; note = 2'-fluoroguanosine-3'-phosphate
  modified_base 17: mod_base = OTHER; note = 2'-O-methyluridine-3'-phosphate
  modified_base 18: mod_base = OTHER; note = 2'-fluorocytidine-3'-phosphate
  modified_base 19: mod_base = OTHER; note = 2'-O-methyluridine-3'-phosphate
  modified_base 20: mod_base = OTHER; note = 2'-fluoroadenosine-3'-phosphate
  modified_base 21: mod_base = OTHER; note = 2'-O-methylguanosine-3'-phosphorothioate
  modified_base 22: mod_base = OTHER; note = 2'-O-methyladenosine-3'-phosphorothioate
  modified_base 23: mod_base = OTHER; note = 2'-O-methyladenosine-3'-phosphate
acaaaagcaaaacaggtctagaa

SEQ ID NO: 623 - RNA, 21 nt, synthetic construct
  source 1..21: mol_type = other RNA; note = Description of Artificial Sequence: Synthetic oligonucleotide
  modified_base 1: mod_base = OTHER; note = 2'-fluorocytidine-3'-phosphorothioate
  modified_base 2: mod_base = OTHER; note = 2'-O-methyluridine-3'-phosphorothioate
  modified_base 3: mod_base = OTHER; note = 2'-fluoroadenosine-3'-phosphate
  modified_base 4: mod_base = OTHER; note = 2'-O-methylguanosine-3'-phosphate
  modified_base 5: mod_base = OTHER; note = 2'-fluoroadenosine-3'-phosphate
  modified_base 6: mod_base = OTHER; note = 2'-O-methylcytidine-3'-phosphate
  modified_base 7: mod_base = OTHER; note = 2'-fluorocytidine-3'-phosphate
  modified_base 8: mod_base = OTHER; note = 2'-O-methyluridine-3'-phosphate
  modified_base 9: mod_base = OTHER; note = 2'-fluoroguanosine-3'-phosphate
  modified_base 10: mod_base = OTHER; note = 2'-fluorouridine-3'-phosphate
  modified_base 11: mod_base = OTHER; note = 2'-fluorouridine-3'-phosphate
  modified_base 12: mod_base = OTHER; note = 2'-O-methyluridine-3'-phosphate
  modified_base 13: mod_base = OTHER; note = 2'-fluorouridine-3'-phosphate
  modified_base 14: mod_base = OTHER; note = 2'-O-methylguanosine-3'-phosphate
  modified_base 15: mod_base = OTHER; note = 2'-fluorocytidine-3'-phosphate
  modified_base 16: mod_base = OTHER; note = 2'-O-methyluridine-3'-phosphate
  modified_base 17: mod_base = OTHER; note = 2'-fluorouridine-3'-phosphate
  modified_base 18: mod_base = OTHER; note = 2'-O-methyluridine-3'-phosphate
  modified_base 19: mod_base = OTHER; note = 2'-fluorouridine-3'-phosphate
  modified_base 20: mod_base = OTHER; note = 2'-O-methylguanosine-3'-phosphate
  modified_base 21: mod_base = OTHER; note = 2'-fluoroadenosine-3'-phosphate N-[tris(GalNAc-alkyl)-amidodecanoyl)]-4-hydroxyprolinol Hyp-(GalNAc-alkyl)3
ctagacctgttttgcttttga

SEQ ID NO: 624 - RNA, 23 nt, synthetic construct
  source 1..23: mol_type = other RNA; note = Description of Artificial Sequence: Synthetic oligonucleotide
  modified_base 1: mod_base = OTHER; note = 2'-O-methyluridine-3'-phosphorothioate
  modified_base 2: mod_base = OTHER; note = 2'-fluorocytidine-3'-phosphorothioate
  modified_base 3: mod_base = OTHER; note = 2'-O-methyladenosine-3'-phosphate
  modified_base 4: mod_base = OTHER; note = 2'-fluoroadenosine-3'-phosphate
  modified_base 5: mod_base = OTHER; note = 2'-O-methyladenosine-3'-phosphate
  modified_base 6: mod_base = OTHER; note = 2'-fluoroadenosine-3'-phosphate
  modified_base 7: mod_base = OTHER; note = 2'-O-methylguanosine-3'-phosphate
  modified_base 8: mod_base = OTHER; note = 2'-fluorocytidine-3'-phosphate
  modified_base 9: mod_base = OTHER; note = 2'-O-methyladenosine-3'-phosphate
  modified_base 10: mod_base = OTHER; note = 2'-fluoroadenosine-3'-phosphate
  modified_base 11: mod_base = OTHER; note = 2'-O-methyladenosine-3'-phosphate
  modified_base 12: mod_base = OTHER; note = 2'-O-methyladenosine-3'-phosphate
  modified_base 13: mod_base = OTHER; note = 2'-O-methylcytidine-3'-phosphate
  modified_base 14: mod_base = OTHER; note = 2'-fluoroadenosine-3'-phosphate
  modified_base 15: mod_base = OTHER; note = 2'-O-methylguanosine-3'-phosphate
  modified_base 16: mod_base = OTHER; note = 2'-fluoroguanosine-3'-phosphate
  modified_base 17: mod_base = OTHER; note = 2'-O-methyluridine-3'-phosphate
  modified_base 18: mod_base = OTHER; note = 2'-fluorocytidine-3'-phosphate
  modified_base 19: mod_base = OTHER; note = 2'-O-methyluridine-3'-phosphate
  modified_base 20: mod_base = OTHER; note = 2'-fluoroadenosine-3'-phosphate
  modified_base 21: mod_base = OTHER; note = 2'-O-methylguanosine-3'-phosphorothioate
  modified_base 22: mod_base = OTHER; note = 2'-O-methyladenosine-3'-phosphorothioate
  modified_base 23: mod_base = OTHER; note = 2'-O-methyladenosine-3'-phosphate
tcaaaagcaaaacaggtctagaa

SEQ ID NO: 625 - RNA, 21 nt, synthetic construct
  source 1..21: mol_type = other RNA; note = Description of Artificial Sequence: Synthetic oligonucleotide
  modified_base 1: mod_base = OTHER; note = 2'-fluoroguanosine-3'-phosphorothioate
  modified_base 2: mod_base = OTHER; note = 2'-O-methyluridine-3'-phosphorothioate
  modified_base 3: mod_base = OTHER; note = 2'-fluoroadenosine-3'-phosphate
  modified_base 4: mod_base = OTHER; note = 2'-O-methylguanosine-3'-phosphate
  modified_base 5: mod_base = OTHER; note = 2'-fluoroadenosine-3'-phosphate
  modified_base 6: mod_base = OTHER; note = 2'-O-methylcytidine-3'-phosphate
  modified_base 7: mod_base = OTHER; note = 2'-fluorocytidine-3'-phosphate
  modified_base 8: mod_base = OTHER; note = 2'-O-methyluridine-3'-phosphate
  modified_base 9: mod_base = OTHER; note = 2'-fluoroguanosine-3'-phosphate
  modified_base 10: mod_base = OTHER; note = 2'-fluorouridine-3'-phosphate
  modified_base 11: mod_base = OTHER; note = 2'-fluorouridine-3'-phosphate
  modified_base 12: mod_base = OTHER; note = 2'-O-methyluridine-3'-phosphate
  modified_base 13: mod_base = OTHER; note = 2'-fluorouridine-3'-phosphate
  modified_base 14: mod_base = OTHER; note = 2'-O-methylguanosine-3'-phosphate
  modified_base 15: mod_base = OTHER; note = 2'-fluorocytidine-3'-phosphate
  modified_base 16: mod_base = OTHER; note = 2'-O-methyluridine-3'-phosphate
  modified_base 17: mod_base = OTHER; note = 2'-fluorouridine-3'-phosphate
  modified_base 18: mod_base = OTHER; note = 2'-O-methyluridine-3'-phosphate
  modified_base 19: mod_base = OTHER; note = 2'-fluorouridine-3'-phosphate
  modified_base 20: mod_base = OTHER; note = 2'-O-methylguanosine-3'-phosphate
  modified_base 21: mod_base = OTHER; note = 2'-fluorouridine-3'-phosphate N-[tris(GalNAc-alkyl)-amidodecanoyl)]-4-hydroxyprolinol Hyp-(GalNAc-alkyl)3
gtagacctgttttgcttttgt

SEQ ID NO: 626 - RNA, 23 nt, synthetic construct
  source 1..23: mol_type = other RNA; note = Description of Artificial Sequence: Synthetic oligonucleotide
  modified_base 1: mod_base = OTHER; note = 2'-O-methyladenosine-3'-phosphorothioate
  modified_base 2: mod_base = OTHER; note = 2'-fluorocytidine-3'-phosphorothioate
  modified_base 3: mod_base = OTHER; note = 2'-O-methyladenosine-3'-phosphate
  modified_base 4: mod_base = OTHER; note = 2'-fluoroadenosine-3'-phosphate
  modified_base 5: mod_base = OTHER; note = 2'-O-methyladenosine-3'-phosphate
  modified_base 6: mod_base = OTHER; note = 2'-fluoroadenosine-3'-phosphate
  modified_base 7: mod_base = OTHER; note = 2'-O-methylguanosine-3'-phosphate
  modified_base 8: mod_base = OTHER; note = 2'-fluorocytidine-3'-phosphate
  modified_base 9: mod_base = OTHER; note = 2'-O-methyladenosine-3'-phosphate
  modified_base 10: mod_base = OTHER; note = 2'-fluoroadenosine-3'-phosphate
  modified_base 11: mod_base = OTHER; note = 2'-O-methyladenosine-3'-phosphate
  modified_base 12: mod_base = OTHER; note = 2'-O-methyladenosine-3'-phosphate
  modified_base 13: mod_base = OTHER; note = 2'-O-methylcytidine-3'-phosphate
  modified_base 14: mod_base = OTHER; note = 2'-fluoroadenosine-3'-phosphate
  modified_base 15: mod_base = OTHER; note = 2'-O-methylguanosine-3'-phosphate
  modified_base 16: mod_base = OTHER; note = 2'-fluoroguanosine-3'-phosphate
  modified_base 17: mod_base = OTHER; note = 2'-O-methyluridine-3'-phosphate
  modified_base 18: mod_base = OTHER; note = 2'-fluorocytidine-3'-phosphate
  modified_base 19: mod_base = OTHER; note = 2'-O-methyluridine-3'-phosphate
  modified_base 20: mod_base = OTHER; note = 2'-fluoroadenosine-3'-phosphate
  modified_base 21: mod_base = OTHER; note = 2'-O-methylcytidine-3'-phosphorothioate
  modified_base 22: mod_base = OTHER; note = 2'-O-methyluridine-3'-phosphorothioate
  modified_base 23: mod_base = OTHER; note = 2'-O-methyluridine-3'-phosphate
acaaaagcaaaacaggtctactt

SEQ ID NO: 627 - RNA, 21 nt, synthetic construct
  source 1..21: mol_type = other RNA; note = Description of Artificial Sequence: Synthetic oligonucleotide
  modified_base 1: mod_base = OTHER; note = 2'-fluoroguanosine-3'-phosphorothioate
  modified_base 2: mod_base = OTHER; note = 2'-O-methyladenosine-3'-phosphorothioate
  modified_base 3: mod_base = OTHER; note = 2'-fluoroadenosine-3'-phosphate
  modified_base 4: mod_base = OTHER; note = 2'-O-methylguanosine-3'-phosphate
  modified_base 5: mod_base = OTHER; note = 2'-fluoroadenosine-3'-phosphate
  modified_base 6: mod_base = OTHER; note = 2'-O-methylcytidine-3'-phosphate
  modified_base 7: mod_base = OTHER; note = 2'-fluorocytidine-3'-phosphate
  modified_base 8: mod_base = OTHER; note = 2'-O-methyluridine-3'-phosphate
  modified_base 9: mod_base = OTHER; note = 2'-fluoroguanosine-3'-phosphate
  modified_base 10: mod_base = OTHER; note = 2'-fluorouridine-3'-phosphate
  modified_base 11: mod_base = OTHER; note = 2'-fluorouridine-3'-phosphate
  modified_base 12: mod_base = OTHER; note = 2'-O-methyluridine-3'-phosphate
  modified_base 13: mod_base = OTHER; note = 2'-fluorouridine-3'-phosphate
  modified_base 14: mod_base = OTHER; note = 2'-O-methylguanosine-3'-phosphate
  modified_base 15: mod_base = OTHER; note = 2'-fluorocytidine-3'-phosphate
  modified_base 16: mod_base = OTHER; note = 2'-O-methyluridine-3'-phosphate
  modified_base 17: mod_base = OTHER; note = 2'-fluorouridine-3'-phosphate
  modified_base 18: mod_base = OTHER; note = 2'-O-methyluridine-3'-phosphate
  modified_base 19: mod_base = OTHER; note = 2'-fluorouridine-3'-phosphate
  modified_base 20: mod_base = OTHER; note = 2'-O-methylguanosine-3'-phosphate
  modified_base 21: mod_base = OTHER; note = 2'-fluorouridine-3'-phosphate N-[tris(GalNAc-alkyl)-amidodecanoyl)]-4-hydroxyprolinol Hyp-(GalNAc-alkyl)3
gaagacctgttttgcttttgt

SEQ ID NO: 628 - RNA, 23 nt, synthetic construct
  source 1..23: mol_type = other RNA; note = Description of Artificial Sequence: Synthetic oligonucleotide
  modified_base 1: mod_base = OTHER; note = 2'-O-methyladenosine-3'-phosphorothioate
  modified_base 2: mod_base = OTHER; note = 2'-fluorocytidine-3'-phosphorothioate
  modified_base 3: mod_base = OTHER; note = 2'-O-methyladenosine-3'-phosphate
  modified_base 4: mod_base = OTHER; note = 2'-fluoroadenosine-3'-phosphate
  modified_base 5: mod_base = OTHER; note = 2'-O-methyladenosine-3'-phosphate
  modified_base 6: mod_base = OTHER; note = 2'-fluoroadenosine-3'-phosphate
  modified_base 7: mod_base = OTHER; note = 2'-O-methylguanosine-3'-phosphate
  modified_base 8: mod_base = OTHER; note = 2'-fluorocytidine-3'-phosphate
  modified_base 9: mod_base = OTHER; note = 2'-O-methyladenosine-3'-phosphate
  modified_base 10: mod_base = OTHER; note = 2'-fluoroadenosine-3'-phosphate
  modified_base 11: mod_base = OTHER; note = 2'-O-methyladenosine-3'-phosphate
  modified_base 12: mod_base = OTHER; note = 2'-O-methyladenosine-3'-phosphate
  modified_base 13: mod_base = OTHER; note = 2'-O-methylcytidine-3'-phosphate
  modified_base 14: mod_base = OTHER; note = 2'-fluoroadenosine-3'-phosphate
  modified_base 15: mod_base = OTHER; note = 2'-O-methylguanosine-3'-phosphate
  modified_base 16: mod_base = OTHER; note = 2'-fluoroguanosine-3'-phosphate
  modified_base 17: mod_base = OTHER; note = 2'-O-methyluridine-3'-phosphate
  modified_base 18: mod_base = OTHER; note = 2'-fluorocytidine-3'-phosphate
  modified_base 19: mod_base = OTHER; note = 2'-O-methyluridine-3'-phosphate
  modified_base 20: mod_base = OTHER; note = 2'-fluorouridine-3'-phosphate
  modified_base 21: mod_base = OTHER; note = 2'-O-methylcytidine-3'-phosphorothioate
  modified_base 22: mod_base = OTHER; note = 2'-O-methyluridine-3'-phosphorothioate
  modified_base 23: mod_base = OTHER; note = 2'-O-methyluridine-3'-phosphate
acaaaagcaaaacaggtcttctt

SEQ ID NO: 629 - RNA, 21 nt, synthetic construct
  source 1..21: mol_type = other RNA; note = Description of Artificial Sequence: Synthetic oligonucleotide
  modified_base 1: mod_base = OTHER; note = 2'-fluoroguanosine-3'-phosphorothioate
  modified_base 2: mod_base = OTHER; note = 2'-O-methyladenosine-3'-phosphorothioate
  modified_base 3: mod_base = OTHER; note = 2'-fluorouridine-3'-phosphate
  modified_base 4: mod_base = OTHER; note = 2'-O-methylguanosine-3'-phosphate
  modified_base 5: mod_base = OTHER; note = 2'-fluoroadenosine-3'-phosphate
  modified_base 6: mod_base = OTHER; note = 2'-O-methylcytidine-3'-phosphate
  modified_base 7: mod_base = OTHER; note = 2'-fluorocytidine-3'-phosphate
  modified_base 8: mod_base = OTHER; note = 2'-O-methyluridine-3'-phosphate
  modified_base 9: mod_base = OTHER; note = 2'-fluoroguanosine-3'-phosphate
  modified_base 10: mod_base = OTHER; note = 2'-fluorouridine-3'-phosphate
  modified_base 11: mod_base = OTHER; note = 2'-fluorouridine-3'-phosphate
  modified_base 12: mod_base = OTHER; note = 2'-O-methyluridine-3'-phosphate
  modified_base 13: mod_base = OTHER; note = 2'-fluorouridine-3'-phosphate
  modified_base 14: mod_base = OTHER; note = 2'-O-methylguanosine-3'-phosphate
  modified_base 15: mod_base = OTHER; note = 2'-fluorocytidine-3'-phosphate
  modified_base 16: mod_base = OTHER; note = 2'-O-methyluridine-3'-phosphate
  modified_base 17: mod_base = OTHER; note = 2'-fluorouridine-3'-phosphate
  modified_base 18: mod_base = OTHER; note = 2'-O-methyluridine-3'-phosphate
  modified_base 19: mod_base = OTHER; note = 2'-fluorouridine-3'-phosphate
  modified_base 20: mod_base = OTHER; note = 2'-O-methylguanosine-3'-phosphate
  modified_base 21: mod_base = OTHER; note = 2'-fluorouridine-3'-phosphate N-[tris(GalNAc-alkyl)-amidodecanoyl)]-4-hydroxyprolinol Hyp-(GalNAc-alkyl)3
gatgacctgttttgcttttgt

SEQ ID NO: 630 - RNA, 23 nt, synthetic construct
  source 1..23: mol_type = other RNA; note = Description of Artificial Sequence: Synthetic oligonucleotide
  modified_base 1: mod_base = OTHER; note = 2'-O-methyladenosine-3'-phosphorothioate
  modified_base 2: mod_base = OTHER; note = 2'-fluorocytidine-3'-phosphorothioate
  modified_base 3: mod_base = OTHER; note = 2'-O-methyladenosine-3'-phosphate
  modified_base 4: mod_base = OTHER; note = 2'-fluoroadenosine-3'-phosphate
  modified_base 5: mod_base = OTHER; note = 2'-O-methyladenosine-3'-phosphate
  modified_base 6: mod_base = OTHER; note = 2'-fluoroadenosine-3'-phosphate
  modified_base 7: mod_base = OTHER; note = 2'-O-methylguanosine-3'-phosphate
  modified_base 8: mod_base = OTHER; note = 2'-fluorocytidine-3'-phosphate
  modified_base 9: mod_base = OTHER; note = 2'-O-methyladenosine-3'-phosphate
  modified_base 10: mod_base = OTHER; note = 2'-fluoroadenosine-3'-phosphate
  modified_base 11: mod_base = OTHER; note = 2'-O-methyladenosine-3'-phosphate
  modified_base 12: mod_base = OTHER; note = 2'-O-methyladenosine-3'-phosphate
  modified_base 13: mod_base = OTHER; note = 2'-O-methylcytidine-3'-phosphate
  modified_base 14: mod_base = OTHER; note = 2'-fluoroadenosine-3'-phosphate
  modified_base 15: mod_base = OTHER; note = 2'-O-methylguanosine-3'-phosphate
  modified_base 16: mod_base = OTHER; note = 2'-fluoroguanosine-3'-phosphate
  modified_base 17: mod_base = OTHER; note = 2'-O-methyluridine-3'-phosphate
  modified_base 18: mod_base = OTHER; note = 2'-fluorocytidine-3'-phosphate
  modified_base 19: mod_base = OTHER; note = 2'-O-methyladenosine-3'-phosphate
  modified_base 20: mod_base = OTHER; note = 2'-fluorouridine-3'-phosphate
  modified_base 21: mod_base = OTHER; note = 2'-O-methylcytidine-3'-phosphorothioate
  modified_base 22: mod_base = OTHER; note = 2'-O-methyluridine-3'-phosphorothioate
  modified_base 23: mod_base = OTHER; note = 2'-O-methyluridine-3'-phosphate
acaaaagcaaaacaggtcatctt

SEQ ID NO: 631 - RNA, 21 nt, synthetic construct
  source 1..21: mol_type = other RNA; note = Description of Artificial Sequence: Synthetic oligonucleotide
  modified_base 1: mod_base = OTHER; note = 2'-fluoroguanosine-3'-phosphorothioate
  modified_base 2: mod_base = OTHER; note = 2'-O-methyladenosine-3'-phosphorothioate
  modified_base 3: mod_base = OTHER; note = 2'-fluorouridine-3'-phosphate
  modified_base 4: mod_base = OTHER; note = 2'-O-methylguanosine-3'-phosphate
  modified_base 5: mod_base = OTHER; note = 2'-fluoroadenosine-3'-phosphate
  modified_base 6: mod_base = OTHER; note = 2'-O-methylcytidine-3'-phosphate
  modified_base 7: mod_base = OTHER; note = 2'-fluorocytidine-3'-phosphate
  modified_base 8: mod_base = OTHER; note = 2'-O-methyluridine-3'-phosphate
  modified_base 9: mod_base = OTHER; note = 2'-fluoroguanosine-3'-phosphate
  modified_base 10: mod_base = OTHER; note = 2'-fluorouridine-3'-phosphate
  modified_base 11: mod_base = OTHER; note = 2'-fluorouridine-3'-phosphate
  modified_base 12: mod_base = OTHER; note = 2'-O-methyluridine-3'-phosphate
  modified_base 13: mod_base = OTHER; note = 2'-fluorouridine-3'-phosphate
  modified_base 14: mod_base = OTHER; note = 2'-O-methylguanosine-3'-phosphate
  modified_base 15: mod_base = OTHER; note = 2'-fluorocytidine-3'-phosphate
  modified_base 16: mod_base = OTHER; note = 2'-O-methyluridine-3'-phosphate
  modified_base 17: mod_base = OTHER; note = 2'-fluorouridine-3'-phosphate
  modified_base 18: mod_base = OTHER; note = 2'-O-methyluridine-3'-phosphate
  modified_base 19: mod_base = OTHER; note = 2'-fluorouridine-3'-phosphate
  modified_base 20: mod_base = OTHER; note = 2'-O-methylguanosine-3'-phosphate
  modified_base 21: mod_base = OTHER; note = 2'-fluorouridine-3'-phosphate N-[tris(GalNAc-alkyl)-amidodecanoyl)]-4-hydroxyprolinol Hyp-(GalNAc-alkyl)3
gatgacctgttttgcttttgt

SEQ ID NO: 632 - RNA, 23 nt, synthetic construct
  source 1..23: mol_type = other RNA; note = Description of Artificial Sequence: Synthetic oligonucleotide
  modified_base 1: mod_base = OTHER; note = 2'-O-methyladenosine-3'-phosphorothioate
  modified_base 2: mod_base = OTHER; note = 2'-fluorocytidine-3'-phosphorothioate
  modified_base 3: mod_base = OTHER; note = 2'-O-methyladenosine-3'-phosphate
  modified_base 4: mod_base = OTHER; note = 2'-fluoroadenosine-3'-phosphate
  modified_base 5: mod_base = OTHER; note = 2'-O-methyladenosine-3'-phosphate
  modified_base 6: mod_base = OTHER; note = 2'-fluoroadenosine-3'-phosphate
  modified_base 7: mod_base = OTHER; note = 2'-O-methylguanosine-3'-phosphate
  modified_base 8: mod_base = OTHER; note = 2'-fluorocytidine-3'-phosphate
  modified_base 9: mod_base = OTHER; note = 2'-O-methyladenosine-3'-phosphate
  modified_base 10: mod_base = OTHER; note = 2'-fluoroadenosine-3'-phosphate
  modified_base 11: mod_base = OTHER; note = 2'-O-methyladenosine-3'-phosphate
  modified_base 12: mod_base = OTHER; note = 2'-O-methyladenosine-3'-phosphate
  modified_base 13: mod_base = OTHER; note = 2'-O-methylcytidine-3'-phosphate
  modified_base 14: mod_base = OTHER; note = 2'-fluoroadenosine-3'-phosphate
  modified_base 15: mod_base = OTHER; note = 2'-O-methylguanosine-3'-phosphate
  modified_base 16: mod_base = OTHER; note = 2'-fluoroguanosine-3'-phosphate
  modified_base 17: mod_base = OTHER; note = 2'-O-methyluridine-3'-phosphate
  modified_base 18: mod_base = OTHER; note = 2'-fluorocytidine-3'-phosphate
  modified_base 19: mod_base = OTHER; note = 2'-O-methyladenosine-3'-phosphate
  modified_base 20: mod_base = OTHER; note = 2'-fluorouridine-3'-phosphate
  modified_base 21: mod_base = OTHER; note = 2'-O-methylcytidine-3'-phosphorothioate
  modified_base 22: mod_base = OTHER; note = 2'-O-methyladenosine-3'-phosphorothioate
  modified_base 23: mod_base = OTHER; note = 2'-O-methyladenosine-3'-phosphate
acaaaagcaaaacaggtcatcaa

SEQ ID NO: 633 - RNA, 21 nt, synthetic construct
  source 1..21: mol_type = other RNA; note = Description of Artificial Sequence: Synthetic oligonucleotide
  modified_base 1: mod_base = OTHER; note = 2'-fluorocytidine-3'-phosphorothioate
  modified_base 2: mod_base = OTHER; note = 2'-O-methyladenosine-3'-phosphorothioate
  modified_base 3: mod_base = OTHER; note = 2'-fluorouridine-3'-phosphate
  modified_base 4: mod_base = OTHER; note = 2'-O-methylcytidine-3'-phosphate
  modified_base 5: mod_base = OTHER; note = 2'-fluoroadenosine-3'-phosphate
  modified_base 6: mod_base = OTHER; note = 2'-O-methylcytidine-3'-phosphate
  modified_base 7: mod_base = OTHER; note = 2'-fluorocytidine-3'-phosphate
  modified_base 8: mod_base = OTHER; note = 2'-O-methyluridine-3'-phosphate
  modified_base 9: mod_base = OTHER; note = 2'-fluoroguanosine-3'-phosphate
  modified_base 10: mod_base = OTHER; note = 2'-fluorouridine-3'-phosphate
  modified_base 11: mod_base = OTHER; note = 2'-fluorouridine-3'-phosphate
  modified_base 12: mod_base = OTHER; note = 2'-O-methyluridine-3'-phosphate
  modified_base 13: mod_base = OTHER; note = 2'-fluorouridine-3'-phosphate
  modified_base 14: mod_base = OTHER; note = 2'-O-methylguanosine-3'-phosphate
  modified_base 15: mod_base = OTHER; note = 2'-fluorocytidine-3'-phosphate
  modified_base 16: mod_base = OTHER; note = 2'-O-methyluridine-3'-phosphate
  modified_base 17: mod_base = OTHER; note = 2'-fluorouridine-3'-phosphate
  modified_base 18: mod_base = OTHER; note = 2'-O-methyluridine-3'-phosphate
  modified_base 19: mod_base = OTHER; note = 2'-fluorouridine-3'-phosphate
  modified_base 20: mod_base = OTHER; note = 2'-O-methylguanosine-3'-phosphate
  modified_base 21: mod_base = OTHER; note = 2'-fluorouridine-3'-phosphate N-[tris(GalNAc-alkyl)-amidodecanoyl)]-4-hydroxyprolinol Hyp-(GalNAc-alkyl)3
catcacctgttttgcttttgt

SEQ ID NO: 634 - RNA, 23 nt, synthetic construct
  source 1..23: mol_type = other RNA; note = Description of Artificial Sequence: Synthetic oligonucleotide
  modified_base 1: mod_base = OTHER; note = 2'-O-methyladenosine-3'-phosphorothioate
  modified_base 2: mod_base = OTHER; note = 2'-fluorocytidine-3'-phosphorothioate
  modified_base 3: mod_base = OTHER; note = 2'-O-methyladenosine-3'-phosphate
  modified_base 4: mod_base = OTHER; note = 2'-fluoroadenosine-3'-phosphate
  modified_base 5: mod_base = OTHER; note = 2'-O-methyladenosine-3'-phosphate
  modified_base 6: mod_base = OTHER; note = 2'-fluoroadenosine-3'-phosphate
  modified_base 7: mod_base = OTHER; note = 2'-O-methylguanosine-3'-phosphate
  modified_base 8: mod_base = OTHER; note = 2'-fluorocytidine-3'-phosphate
  modified_base 9: mod_base = OTHER; note = 2'-O-methyladenosine-3'-phosphate
  modified_base 10: mod_base = OTHER; note = 2'-fluoroadenosine-3'-phosphate
  modified_base 11: mod_base = OTHER; note = 2'-O-methyladenosine-3'-phosphate
  modified_base 12: mod_base = OTHER; note = 2'-O-methyladenosine-3'-phosphate
  modified_base 13: mod_base = OTHER; note = 2'-O-methylcytidine-3'-phosphate
  modified_base 14: mod_base = OTHER; note = 2'-fluoroadenosine-3'-phosphate
  modified_base 15: mod_base = OTHER; note = 2'-O-methylguanosine-3'-phosphate
  modified_base 16: mod_base = OTHER; note = 2'-fluoroguanosine-3'-phosphate
  modified_base 17: mod_base = OTHER; note = 2'-O-methyluridine-3'-phosphate
  modified_base 18: mod_base = OTHER; note = 2'-fluoroguanosine-3'-phosphate
  modified_base 19: mod_base = OTHER; note = 2'-O-methyladenosine-3'-phosphate
  modified_base 20: mod_base = OTHER; note = 2'-fluorouridine-3'-phosphate
  modified_base 21: mod_base = OTHER; note = 2'-O-methylguanosine-3'-phosphorothioate
  modified_base 22: mod_base = OTHER; note = 2'-O-methyladenosine-3'-phosphorothioate
  modified_base 23: mod_base = OTHER; note = 2'-O-methyladenosine-3'-phosphate
acaaaagcaaaacaggtgatgaa

SEQ ID NO: 635 - RNA, 21 nt, synthetic construct
  source 1..21: mol_type = other RNA; note = Description of Artificial Sequence: Synthetic oligonucleotide
  modified_base 1: mod_base = OTHER; note = 2'-fluorocytidine-3'-phosphorothioate
  modified_base 2: mod_base = OTHER; note = 2'-O-methyluridine-3'-phosphorothioate
  modified_base 3: mod_base = OTHER; note = 2'-fluorouridine-3'-phosphate
  modified_base 4: mod_base = OTHER; note = 2'-O-methylcytidine-3'-phosphate
  modified_base 5: mod_base = OTHER; note = 2'-fluorouridine-3'-phosphate
  modified_base 6: mod_base = OTHER; note = 2'-O-methylcytidine-3'-phosphate
  modified_base 7: mod_base = OTHER; note = 2'-fluorocytidine-3'-phosphate
  modified_base 8: mod_base = OTHER; note = 2'-O-methyluridine-3'-phosphate
  modified_base 9: mod_base = OTHER; note = 2'-fluoroguanosine-3'-phosphate
  modified_base 10: mod_base = OTHER; note = 2'-fluorouridine-3'-phosphate
  modified_base 11: mod_base = OTHER; note = 2'-fluorouridine-3'-phosphate
  modified_base 12: mod_base = OTHER; note = 2'-O-methyluridine-3'-phosphate
  modified_base 13: mod_base = OTHER; note = 2'-fluorouridine-3'-phosphate
  modified_base 14: mod_base = OTHER; note = 2'-O-methylguanosine-3'-phosphate
  modified_base 15: mod_base = OTHER; note = 2'-fluorocytidine-3'-phosphate
  modified_base 16: mod_base = OTHER; note = 2'-O-methyluridine-3'-phosphate
  modified_base 17: mod_base = OTHER; note = 2'-fluorouridine-3'-phosphate
  modified_base 18: mod_base = OTHER; note = 2'-O-methyluridine-3'-phosphate
  modified_base 19: mod_base = OTHER; note = 2'-fluorouridine-3'-phosphate
  modified_base 20: mod_base = OTHER; note = 2'-O-methylguanosine-3'-phosphate
  modified_base 21: mod_base = OTHER; note = 2'-fluorouridine-3'-phosphate N-[tris(GalNAc-alkyl)-amidodecanoyl)]-4-hydroxyprolinol Hyp-(GalNAc-alkyl)3
cttctcctgttttgcttttgt

SEQ ID NO: 636 - RNA, 23 nt, synthetic construct
  source 1..23: mol_type = other RNA; note = Description of Artificial Sequence: Synthetic oligonucleotide
  modified_base 1: mod_base = OTHER; note = 2'-O-methyladenosine-3'-phosphorothioate
  modified_base 2: mod_base = OTHER; note = 2'-fluorocytidine-3'-phosphorothioate
  modified_base 3: mod_base = OTHER; note = 2'-O-methyladenosine-3'-phosphate
  modified_base 4: mod_base = OTHER; note = 2'-fluoroadenosine-3'-phosphate
  modified_base 5: mod_base = OTHER; note = 2'-O-methyladenosine-3'-phosphate
  modified_base 6: mod_base = OTHER; note = 2'-fluoroadenosine-3'-phosphate
  modified_base 7: mod_base = OTHER; note = 2'-O-methylguanosine-3'-phosphate
  modified_base 8: mod_base = OTHER; note = 2'-fluorocytidine-3'-phosphate
  modified_base 9: mod_base = OTHER; note = 2'-O-methyladenosine-3'-phosphate
  modified_base 10: mod_base = OTHER; note = 2'-fluoroadenosine-3'-phosphate
  modified_base 11: mod_base = OTHER; note = 2'-O-methyladenosine-3'-phosphate
  modified_base 12: mod_base = OTHER; note = 2'-O-methyladenosine-3'-phosphate
  modified_base 13: mod_base = OTHER; note = 2'-O-methylcytidine-3'-phosphate
  modified_base 14: mod_base = OTHER; note = 2'-fluoroadenosine-3'-phosphate
  modified_base 15: mod_base = OTHER; note = 2'-O-methylguanosine-3'-phosphate
  modified_base 16: mod_base = OTHER; note = 2'-fluoroguanosine-3'-phosphate
  modified_base 17: mod_base = OTHER; note = 2'-O-methyladenosine-3'-phosphate
  modified_base 18: mod_base = OTHER; note = 2'-fluoroguanosine-3'-phosphate
  modified_base 19: mod_base = OTHER; note = 2'-O-methyladenosine-3'-phosphate
  modified_base 20: mod_base = OTHER; note = 2'-fluoroadenosine-3'-phosphate
  modified_base 21: mod_base = OTHER; note = 2'-O-methylguanosine-3'-phosphorothioate
  modified_base 22: mod_base = OTHER; note = 2'-O-methyladenosine-3'-phosphorothioate
  modified_base 23: mod_base = OTHER; note = 2'-O-methyladenosine-3'-phosphate
acaaaagcaaaacaggagaagaa

SEQ ID NO: 637 - RNA, 21 nt, synthetic construct
  source 1..21: mol_type = other RNA; note = Description of Artificial Sequence: Synthetic oligonucleotide
  modified_base 1: mod_base = OTHER; note = 2'-fluorocytidine-3'-phosphorothioate
  modified_base 2: mod_base = OTHER; note = 2'-O-methyluridine-3'-phosphorothioate
  modified_base 3: mod_base = OTHER; note = 2'-fluoroadenosine-3'-phosphate
  modified_base 4: mod_base = OTHER; note = 2'-O-methylcytidine-3'-phosphate
  modified_base 5: mod_base = OTHER; note = 2'-fluorouridine-3'-phosphate
  modified_base 6: mod_base = OTHER; note = 2'-O-methylguanosine-3'-phosphate
  modified_base 7: mod_base = OTHER; note = 2'-fluorocytidine-3'-phosphate
  modified_base 8: mod_base = OTHER; note = 2'-O-methyluridine-3'-phosphate
  modified_base 9: mod_base = OTHER; note = 2'-fluoroguanosine-3'-phosphate
  modified_base 10: mod_base = OTHER; note = 2'-fluorouridine-3'-phosphate
  modified_base 11: mod_base = OTHER; note = 2'-fluorouridine-3'-phosphate
  modified_base 12: mod_base = OTHER; note = 2'-O-methyluridine-3'-phosphate
  modified_base 13: mod_base = OTHER; note = 2'-fluorouridine-3'-phosphate
  modified_base 14: mod_base = OTHER; note = 2'-O-methylguanosine-3'-phosphate
  modified_base 15: mod_base = OTHER; note = 2'-fluorocytidine-3'-phosphate
  modified_base 16: mod_base = OTHER; note = 2'-O-methyluridine-3'-phosphate
  modified_base 17: mod_base = OTHER; note = 2'-fluorouridine-3'-phosphate
  modified_base 18: mod_base = OTHER; note = 2'-O-methyluridine-3'-phosphate
  modified_base 19: mod_base = OTHER; note = 2'-fluorouridine-3'-phosphate
  modified_base 20: mod_base = OTHER; note = 2'-O-methylguanosine-3'-phosphate
  modified_base 21: mod_base = OTHER; note = 2'-fluorouridine-3'-phosphate N-[tris(GalNAc-alkyl)-amidodecanoyl)]-4-hydroxyprolinol Hyp-(GalNAc-alkyl)3
ctactgctgttttgcttttgt

SEQ ID NO: 638 - RNA, 23 nt, synthetic construct
  source 1..23: mol_type = other RNA; note = Description of Artificial Sequence: Synthetic oligonucleotide
  modified_base 1: mod_base = OTHER; note = 2'-O-methyladenosine-3'-phosphorothioate
  modified_base 2: mod_base = OTHER; note = 2'-fluorocytidine-3'-phosphorothioate
  modified_base 3: mod_base = OTHER; note = 2'-O-methyladenosine-3'-phosphate
  modified_base 4: mod_base = OTHER; note = 2'-fluoroadenosine-3'-phosphate
  modified_base 5: mod_base = OTHER; note = 2'-O-methyladenosine-3'-phosphate
  modified_base 6: mod_base = OTHER; note = 2'-fluoroadenosine-3'-phosphate
  modified_base 7: mod_base = OTHER; note = 2'-O-methylguanosine-3'-phosphate
  modified_base 8: mod_base = OTHER; note = 2'-fluorocytidine-3'-phosphate
  modified_base 9: mod_base = OTHER; note = 2'-O-methyladenosine-3'-phosphate
  modified_base 10: mod_base = OTHER; note = 2'-fluoroadenosine-3'-phosphate
  modified_base 11: mod_base = OTHER; note = 2'-O-methyladenosine-3'-phosphate
  modified_base 12: mod_base = OTHER; note = 2'-O-methyladenosine-3'-phosphate
  modified_base 13: mod_base = OTHER; note = 2'-O-methylcytidine-3'-phosphate
  modified_base 14: mod_base = OTHER; note = 2'-fluoroadenosine-3'-phosphate
  modified_base 15: mod_base = OTHER; note = 2'-O-methylguanosine-3'-phosphate
  modified_base 16: mod_base = OTHER; note = 2'-fluorocytidine-3'-phosphate
  modified_base 17: mod_base = OTHER; note = 2'-O-methyladenosine-3'-phosphate
  modified_base 18: mod_base = OTHER; note = 2'-fluoroguanosine-3'-phosphate
  modified_base 19: mod_base = OTHER; note = 2'-O-methyluridine-3'-phosphate
  modified_base 20: mod_base = OTHER; note = 2'-fluoroadenosine-3'-phosphate
  modified_base 21: mod_base = OTHER; note = 2'-O-methylguanosine-3'-phosphorothioate
  modified_base 22: mod_base = OTHER; note = 2'-O-methyladenosine-3'-phosphorothioate
  modified_base 23: mod_base = OTHER; note = 2'-O-methyladenosine-3'-phosphate
acaaaagcaaaacagcagtagaa

SEQ ID NO: 639 - RNA, 21 nt, synthetic construct
  source 1..21: mol_type = other RNA; note = Description of Artificial Sequence: Synthetic oligonucleotide
  modified_base 1: mod_base = OTHER; note = 2'-fluorocytidine-3'-phosphorothioate
  modified_base 2: mod_base = OTHER; note = 2'-O-methyluridine-3'-phosphorothioate
  modified_base 3: mod_base = OTHER; note = 2'-fluoroadenosine-3'-phosphate
  modified_base 4: mod_base = OTHER; note = 2'-O-methylguanosine-3'-phosphate
  modified_base 5: mod_base = OTHER; note = 2'-fluoroadenosine-3'-phosphate
  modified_base 6: mod_base = OTHER; note = 2'-O-methylcytidine-3'-phosphate
  modified_base 7: mod_base = OTHER; note = 2'-fluorocytidine-3'-phosphate
  modified_base 8: mod_base = OTHER; note = 2'-O-methyluridine-3'-phosphate
  modified_base 9: mod_base = OTHER; note = 2'-fluoroguanosine-3'-phosphate
  modified_base 10: mod_base = OTHER; note = 2'-fluorouridine-3'-phosphate
  modified_base 11: mod_base = OTHER; note = 2'-fluorouridine-3'-phosphate
  modified_base 12: mod_base = OTHER; note = 2'-O-methyluridine-3'-phosphate
  modified_base 13: mod_base = OTHER; note = 2'-fluorouridine-3'-phosphate
  modified_base 14: mod_base = OTHER; note = 2'-O-methylguanosine-3'-phosphate
  modified_base 15: mod_base = OTHER; note = 2'-fluorocytidine-3'-phosphate
  modified_base 16: mod_base = OTHER; note = 2'-O-methyluridine-3'-phosphate
  modified_base 17: mod_base = OTHER; note = 2'-fluorouridine-3'-phosphate
  modified_base 18: mod_base = OTHER; note = 2'-O-methyluridine-3'-phosphate
  modified_base 19: mod_base = OTHER; note = 2'-fluorouridine-3'-phosphate
  modified_base 20: mod_base = OTHER; note = 2'-O-methylguanosine-3'-phosphate
  modified_base 21: mod_base = OTHER; note = 2'-fluorouridine-3'-phosphate N-[tris(GalNAc-alkyl)-amidodecanoyl)]-4-hydroxyprolinol Hyp-(GalNAc-alkyl)3
ctagacctgttttgcttttgt

SEQ ID NO: 640 - RNA, 23 nt, synthetic construct
  source 1..23: mol_type = other RNA; note = Description of Artificial Sequence: Synthetic oligonucleotide
  modified_base 1: mod_base = OTHER; note = 2'-O-methyladenosine-3'-phosphorothioate
  modified_base 2: mod_base = OTHER; note = 2'-fluorocytidine-3'-phosphorothioate
  modified_base 3: mod_base = OTHER; note = 2'-O-methyladenosine-3'-phosphate
  modified_base 4: mod_base = OTHER; note = 2'-fluoroadenosine-3'-phosphate
  modified_base 5: mod_base = OTHER; note = 2'-O-methyladenosine-3'-phosphate
  modified_base 6: mod_base = OTHER; note = 2'-fluoroadenosine-3'-phosphate
  modified_base 7: mod_base = OTHER; note = 2'-O-methylguanosine-3'-phosphate
  modified_base 8: mod_base = OTHER; note = 2'-fluorocytidine-3'-phosphate
  modified_base 9: mod_base = OTHER; note = 2'-O-methyladenosine-3'-phosphate
  modified_base 10: mod_base = OTHER; note = 2'-fluoroadenosine-3'-phosphate
  modified_base 11: mod_base = OTHER; note = 2'-O-methyladenosine-3'-phosphate
  modified_base 12: mod_base = OTHER; note = 2'-O-methyladenosine-3'-phosphate
  modified_base 13: mod_base = OTHER; note = 2'-O-methylcytidine-3'-phosphate
  modified_base 14: mod_base = OTHER; note = 2'-fluoroadenosine-3'-phosphate
  modified_base 15: mod_base = OTHER; note = 2'-O-methylguanosine-3'-phosphate
  modified_base 16: mod_base = OTHER; note = 2'-fluoroguanosine-3'-phosphate
  modified_base 17: mod_base = OTHER; note = 2'-O-methyluridine-3'-phosphate
  modified_base 18: mod_base = OTHER; note = 2'-fluorocytidine-3'-phosphate
  modified_base 19: mod_base = OTHER; note = 2'-O-methyluridine-3'-phosphate
  modified_base 20: mod_base = OTHER; note = 2'-fluoroadenosine-3'-phosphate
  modified_base 21: mod_base = OTHER; note = 2'-O-methylguanosine-3'-phosphorothioate
  modified_base 22: mod_base = OTHER; note = 2'-O-methyladenosine-3'-phosphorothioate
  modified_base 23: mod_base = OTHER; note = 2'-O-methyladenosine-3'-phosphate
acaaaagcaaaacaggtctagaa

SEQ ID NO: 641 - RNA, 21 nt, synthetic construct
  source 1..21: mol_type = other RNA; note = Description of Artificial Sequence: Synthetic oligonucleotide
  modified_base 1: mod_base = OTHER; note = 2'-fluorocytidine-3'-phosphorothioate
  modified_base 2: mod_base = OTHER; note = 2'-O-methyluridine-3'-phosphorothioate
  modified_base 3: mod_base = OTHER; note = 2'-fluoroadenosine-3'-phosphate
  modified_base 4: mod_base = OTHER; note = 2'-O-methylguanosine-3'-phosphate
  modified_base 5: mod_base = OTHER; note = 2'-fluoroadenosine-3'-phosphate
  modified_base 6: mod_base = OTHER; note = 2'-O-methylcytidine-3'-phosphate
  modified_base 7: mod_base = OTHER; note = 2'-fluorocytidine-3'-phosphate
  modified_base 8: mod_base = OTHER; note = 2'-O-methyluridine-3'-phosphate
  modified_base 9: mod_base = OTHER; note = 2'-fluoroguanosine-3'-phosphate
  modified_base 10: mod_base = OTHER; note = 2'-fluorouridine-3'-phosphate
  modified_base 11: mod_base = OTHER; note = 2'-fluorouridine-3'-phosphate
  modified_base 12: mod_base = OTHER; note = 2'-O-methyluridine-3'-phosphate
  modified_base 13: mod_base = OTHER; note = 2'-fluorouridine-3'-phosphate
  modified_base 14: mod_base = OTHER; note = 2'-O-methylguanosine-3'-phosphate
  modified_base 15: mod_base = OTHER; note = 2'-fluorocytidine-3'-phosphate
  modified_base 16: mod_base = OTHER; note = 2'-O-methyluridine-3'-phosphate
  modified_base 17: mod_base = OTHER; note = 2'-fluorouridine-3'-phosphate
  modified_base 18: mod_base = OTHER; note = 2'-O-methyluridine-3'-phosphate
  modified_base 19: mod_base = OTHER; note = 2'-fluorouridine-3'-phosphate
  modified_base 20: mod_base = OTHER; note = 2'-O-methylguanosine-3'-phosphate
  modified_base 21: mod_base = OTHER; note = 2'-fluorouridine-3'-phosphate N-[tris(GalNAc-alkyl)-amidodecanoyl)]-4-hydroxyprolinol Hyp-(GalNAc-alkyl)3
ctagacctgttttgcttttgt

SEQ ID NO: 642 - RNA, 23 nt, synthetic construct
  source 1..23: mol_type = other RNA; note = Description of Artificial Sequence: Synthetic oligonucleotide
  modified_base 1: mod_base = OTHER; note = 2'-O-methyladenosine-3'-phosphorothioate
  modified_base 2: mod_base = OTHER; note = 2'-fluorocytidine-3'-phosphorothioate
  modified_base 3: mod_base = OTHER; note = 2'-O-methyladenosine-3'-phosphate
  modified_base 4: mod_base = OTHER; note = 2'-fluoroadenosine-3'-phosphate
  modified_base 5: mod_base = OTHER; note = 2'-O-methyladenosine-3'-phosphate
  modified_base 6: mod_base = OTHER; note = 2'-fluoroadenosine-3'-phosphate
  modified_base 7: mod_base = OTHER; note = 2'-O-methylguanosine-3'-phosphate
  modified_base 8: mod_base = OTHER; note = 2'-fluorocytidine-3'-phosphate
  modified_base 9: mod_base = OTHER; note 2'-O-(1-hexyl-4-methylene-1,2,3-triazolyl)-adenosine-3'-pho sphate
  modified_base 10: mod_base = OTHER; note = 2'-fluoroadenosine-3'-phosphate
  modified_base 11: mod_base = OTHER; note = 2'-O-methyladenosine-3'-phosphate
  modified_base 12: mod_base = OTHER; note = 2'-O-methyladenosine-3'-phosphate
  modified_base 13: mod_base = OTHER; note = 2'-O-methylcytidine-3'-phosphate
  modified_base 14: mod_base = OTHER; note = 2'-fluoroadenosine-3'-phosphate
  modified_base 15: mod_base = OTHER; note = 2'-O-methylguanosine-3'-phosphate
  modified_base 16: mod_base = OTHER; note = 2'-fluoroguanosine-3'-phosphate
  modified_base 17: mod_base = OTHER; note = 2'-O-methyluridine-3'-phosphate
  modified_base 18: mod_base = OTHER; note = 2'-fluorocytidine-3'-phosphate
  modified_base 19: mod_base = OTHER; note = 2'-O-methyluridine-3'-phosphate
  modified_base 20: mod_base = OTHER; note = 2'-fluoroadenosine-3'-phosphate
  modified_base 21: mod_base = OTHER; note = 2'-O-methylguanosine-3'-phosphorothioate
  modified_base 22: mod_base = OTHER; note = 2'-O-methyladenosine-3'-phosphorothioate
  modified_base 23: mod_base = OTHER; note = 2'-O-methyladenosine-3'-phosphate
acaaaagcaaaacaggtctagaa

SEQ ID NO: 643 - RNA, 21 nt, synthetic construct
  source 1..21: mol_type = other RNA; note = Description of Artificial Sequence: Synthetic oligonucleotide
  modified_base 1: mod_base = OTHER; note = 2'-fluorocytidine-3'-phosphorothioate
  modified_base 2: mod_base = OTHER; note = 2'-O-methyluridine-3'-phosphorothioate
  modified_base 3: mod_base = OTHER; note = 2'-fluoroadenosine-3'-phosphate
  modified_base 4: mod_base = OTHER; note = 2'-O-methylguanosine-3'-phosphate
  modified_base 5: mod_base = OTHER; note = 2'-fluoroadenosine-3'-phosphate
  modified_base 6: mod_base = OTHER; note = 2'-O-methylcytidine-3'-phosphate
  modified_base 7: mod_base = OTHER; note = 2'-fluorocytidine-3'-phosphate
  modified_base 8: mod_base = OTHER; note = 2'-O-methyluridine-3'-phosphate
  modified_base 9: mod_base = OTHER; note = 2'-fluoroguanosine-3'-phosphate
  modified_base 10: mod_base = OTHER; note = 2'-fluorouridine-3'-phosphate
  modified_base 11: mod_base = OTHER; note = 2'-fluorouridine-3'-phosphate
  modified_base 12: mod_base = OTHER; note = 2'-O-methyluridine-3'-phosphate
  modified_base 13: mod_base = OTHER; note = 2'-fluorouridine-3'-phosphate
  modified_base 14: mod_base = OTHER; note = 2'-O-methylguanosine-3'-phosphate
  modified_base 15: mod_base = OTHER; note = 2'-fluorocytidine-3'-phosphate
  modified_base 16: mod_base = OTHER; note = 2'-O-methyluridine-3'-phosphate
  modified_base 17: mod_base = OTHER; note = 2'-fluorouridine-3'-phosphate
  modified_base 18: mod_base = OTHER; note = 2'-O-methyluridine-3'-phosphate
  modified_base 19: mod_base = OTHER; note = 2'-fluorouridine-3'-phosphate
  modified_base 20: mod_base = OTHER; note = 2'-O-methylguanosine-3'-phosphate
  modified_base 21: mod_base = OTHER; note = 2'-fluorouridine-3'-phosphate N-[tris(GalNAc-alkyl)-amidodecanoyl)]-4-hydroxyprolinol Hyp-(GalNAc-alkyl)3
ctagacctgttttgcttttgt

SEQ ID NO: 644 - RNA, 23 nt, synthetic construct
  source 1..23: mol_type = other RNA; note = Description of Artificial Sequence: Synthetic oligonucleotide
  modified_base 1: mod_base = OTHER; note = 2'-O-methyladenosine-3'-phosphorothioate
  modified_base 2: mod_base = OTHER; note = 2'-fluorocytidine-3'-phosphorothioate
  modified_base 3: mod_base = OTHER; note = 2'-O-methyladenosine-3'-phosphate
  modified_base 4: mod_base = OTHER; note = 2'-fluoroadenosine-3'-phosphate
  modified_base 5: mod_base = OTHER; note = 2'-O-methyladenosine-3'-phosphate
  modified_base 6: mod_base = OTHER; note = 2'-fluoroadenosine-3'-phosphate
  modified_base 7: mod_base = OTHER; note = 2'-O-methylguanosine-3'-phosphate
  modified_base 8: mod_base = OTHER; note = 2'-fluorocytidine-3'-phosphate
  modified_base 9: mod_base = OTHER; note = 2'-O-methyladenosine-3'-phosphate
  modified_base 10: mod_base = OTHER; note 2'-O-(1-hexyl-4-methylene-1,2,3-triazolyl)-adenosine-3'-pho sphate
  modified_base 11: mod_base = OTHER; note = 2'-O-methyladenosine-3'-phosphate
  modified_base 12: mod_base = OTHER; note = 2'-O-methyladenosine-3'-phosphate
  modified_base 13: mod_base = OTHER; note = 2'-O-methylcytidine-3'-phosphate
  modified_base 14: mod_base = OTHER; note = 2'-fluoroadenosine-3'-phosphate
  modified_base 15: mod_base = OTHER; note = 2'-O-methylguanosine-3'-phosphate
  modified_base 16: mod_base = OTHER; note = 2'-fluoroguanosine-3'-phosphate
  modified_base 17: mod_base = OTHER; note = 2'-O-methyluridine-3'-phosphate
  modified_base 18: mod_base = OTHER; note = 2'-fluorocytidine-3'-phosphate
  modified_base 19: mod_base = OTHER; note = 2'-O-methyluridine-3'-phosphate
  modified_base 20: mod_base = OTHER; note = 2'-fluoroadenosine-3'-phosphate
  modified_base 21: mod_base = OTHER; note = 2'-O-methylguanosine-3'-phosphorothioate
  modified_base 22: mod_base = OTHER; note = 2'-O-methyladenosine-3'-phosphorothioate
  modified_base 23: mod_base = OTHER; note = 2'-O-methyladenosine-3'-phosphate
acaaaagcaaaacaggtctagaa

SEQ ID NO: 645 - RNA, 21 nt, synthetic construct
  source 1..21: mol_type = other RNA; note = Description of Artificial Sequence: Synthetic oligonucleotide
  modified_base 1: mod_base = OTHER; note = 2'-fluorocytidine-3'-phosphorothioate
  modified_base 2: mod_base = OTHER; note = 2'-O-methyluridine-3'-phosphorothioate
  modified_base 3: mod_base = OTHER; note = 2'-fluoroadenosine-3'-phosphate
  modified_base 4: mod_base = OTHER; note = 2'-O-methylguanosine-3'-phosphate
  modified_base 5: mod_base = OTHER; note = 2'-fluoroadenosine-3'-phosphate
  modified_base 6: mod_base = OTHER; note = 2'-O-methylcytidine-3'-phosphate
  modified_base 7: mod_base = OTHER; note = 2'-fluorocytidine-3'-phosphate
  modified_base 8: mod_base = OTHER; note = 2'-O-methyluridine-3'-phosphate
  modified_base 9: mod_base = OTHER; note = 2'-fluoroguanosine-3'-phosphate
  modified_base 10: mod_base = OTHER; note = 2'-fluorouridine-3'-phosphate
  modified_base 11: mod_base = OTHER; note = 2'-fluorouridine-3'-phosphate
  modified_base 12: mod_base = OTHER; note = 2'-O-methyluridine-3'-phosphate
  modified_base 13: mod_base = OTHER; note = 2'-fluorouridine-3'-phosphate
  modified_base 14: mod_base = OTHER; note = 2'-O-methylguanosine-3'-phosphate
  modified_base 15: mod_base = OTHER; note = 2'-fluorocytidine-3'-phosphate
  modified_base 16: mod_base = OTHER; note = 2'-O-methyluridine-3'-phosphate
  modified_base 17: mod_base = OTHER; note = 2'-fluorouridine-3'-phosphate
  modified_base 18: mod_base = OTHER; note = 2'-O-methyluridine-3'-phosphate
  modified_base 19: mod_base = OTHER; note = 2'-fluorouridine-3'-phosphate
  modified_base 20: mod_base = OTHER; note = 2'-O-methylguanosine-3'-phosphate
  modified_base 21: mod_base = OTHER; note = 2'-fluorouridine-3'-phosphate N-[tris(GalNAc-alkyl)-amidodecanoyl)]-4-hydroxyprolinol Hyp-(GalNAc-alkyl)3
ctagacctgttttgcttttgt

SEQ ID NO: 646 - RNA, 23 nt, synthetic construct
  source 1..23: mol_type = other RNA; note = Description of Artificial Sequence: Synthetic oligonucleotide
  modified_base 1: mod_base = OTHER; note = 2'-O-methyladenosine-3'-phosphorothioate
  modified_base 2: mod_base = OTHER; note = 2'-fluorocytidine-3'-phosphorothioate
  modified_base 3: mod_base = OTHER; note = 2'-O-methyladenosine-3'-phosphate
  modified_base 4: mod_base = OTHER; note = 2'-fluoroadenosine-3'-phosphate
  modified_base 5: mod_base = OTHER; note = 2'-O-methyladenosine-3'-phosphate
  modified_base 6: mod_base = OTHER; note = 2'-fluoroadenosine-3'-phosphate
  modified_base 7: mod_base = OTHER; note = 2'-O-methylguanosine-3'-phosphate
  modified_base 8: mod_base = OTHER; note = 2'-fluorocytidine-3'-phosphate
  modified_base 9: mod_base = OTHER; note = 2'-O-methyladenosine-3'-phosphate
  modified_base 10: mod_base = OTHER; note = 2'-fluoroadenosine-3'-phosphate
  modified_base 11: mod_base = OTHER; note 2'-O-(1-hexyl-4-methylene-1,2,3-triazolyl)-adenosine-3'-pho sphate
  modified_base 12: mod_base = OTHER; note = 2'-O-methyladenosine-3'-phosphate
  modified_base 13: mod_base = OTHER; note = 2'-O-methylcytidine-3'-phosphate
  modified_base 14: mod_base = OTHER; note = 2'-fluoroadenosine-3'-phosphate
  modified_base 15: mod_base = OTHER; note = 2'-O-methylguanosine-3'-phosphate
  modified_base 16: mod_base = OTHER; note = 2'-fluoroguanosine-3'-phosphate
  modified_base 17: mod_base = OTHER; note = 2'-O-methyluridine-3'-phosphate
  modified_base 18: mod_base = OTHER; note = 2'-fluorocytidine-3'-phosphate
  modified_base 19: mod_base = OTHER; note = 2'-O-methyluridine-3'-phosphate
  modified_base 20: mod_base = OTHER; note = 2'-fluoroadenosine-3'-phosphate
  modified_base 21: mod_base = OTHER; note = 2'-O-methylguanosine-3'-phosphorothioate
  modified_base 22: mod_base = OTHER; note = 2'-O-methyladenosine-3'-phosphorothioate
  modified_base 23: mod_base = OTHER; note = 2'-O-methyladenosine-3'-phosphate
acaaaagcaaaacaggtctagaa

SEQ ID NO: 647 - RNA, 21 nt, synthetic construct
  source 1..21: mol_type = other RNA; note = Description of Artificial Sequence: Synthetic oligonucleotide
  modified_base 1: mod_base = OTHER; note = 2'-fluorocytidine-3'-phosphorothioate
  modified_base 2: mod_base = OTHER; note = 2'-O-methyluridine-3'-phosphorothioate
  modified_base 3: mod_base = OTHER; note = 2'-fluoroadenosine-3'-phosphate
  modified_base 4: mod_base = OTHER; note = 2'-O-methylguanosine-3'-phosphate
  modified_base 5: mod_base = OTHER; note = 2'-fluoroadenosine-3'-phosphate
  modified_base 6: mod_base = OTHER; note = 2'-O-methylcytidine-3'-phosphate
  modified_base 7: mod_base = OTHER; note = 2'-fluorocytidine-3'-phosphate
  modified_base 8: mod_base = OTHER; note = 2'-O-methyluridine-3'-phosphate
  modified_base 9: mod_base = OTHER; note = 2'-fluoroguanosine-3'-phosphate
  modified_base 10: mod_base = OTHER; note = 2'-fluorouridine-3'-phosphate
  modified_base 11: mod_base = OTHER; note = 2'-fluorouridine-3'-phosphate
  modified_base 12: mod_base = OTHER; note = 2'-O-methyluridine-3'-phosphate
  modified_base 13: mod_base = OTHER; note = 2'-fluorouridine-3'-phosphate
  modified_base 14: mod_base = OTHER; note = 2'-O-methylguanosine-3'-phosphate
  modified_base 15: mod_base = OTHER; note = 2'-fluorocytidine-3'-phosphate
  modified_base 16: mod_base = OTHER; note = 2'-O-methyluridine-3'-phosphate
  modified_base 17: mod_base = OTHER; note = 2'-fluorouridine-3'-phosphate
  modified_base 18: mod_base = OTHER; note = 2'-O-methyluridine-3'-phosphate
  modified_base 19: mod_base = OTHER; note = 2'-fluorouridine-3'-phosphate
  modified_base 20: mod_base = OTHER; note = 2'-O-methylguanosine-3'-phosphate
  modified_base 21: mod_base = OTHER; note = 2'-fluorouridine-3'-phosphate N-[tris(GalNAc-alkyl)-amidodecanoyl)]-4-hydroxyprolinol Hyp-(GalNAc-alkyl)3
ctagacctgttttgcttttgt

SEQ ID NO: 648 - RNA, 23 nt, synthetic construct
  source 1..23: mol_type = other RNA; note = Description of Artificial Sequence: Synthetic oligonucleotide
  modified_base 1: mod_base = OTHER; note = 2'-O-methyladenosine-3'-phosphorothioate
  modified_base 2: mod_base = OTHER; note = 2'-fluorocytidine-3'-phosphorothioate
  modified_base 3: mod_base = OTHER; note = 2'-O-methyladenosine-3'-phosphate
  modified_base 4: mod_base = OTHER; note = 2'-fluoroadenosine-3'-phosphate
  modified_base 5: mod_base = OTHER; note = 2'-O-methyladenosine-3'-phosphate
  modified_base 6: mod_base = OTHER; note = 2'-fluoroadenosine-3'-phosphate
  modified_base 7: mod_base = OTHER; note = 2'-O-methylguanosine-3'-phosphate
  modified_base 8: mod_base = OTHER; note = 2'-fluorocytidine-3'-phosphate
  modified_base 9: mod_base = OTHER; note = 2'-O-methyladenosine-3'-phosphate
  modified_base 10: mod_base = OTHER; note = 2'-fluoroadenosine-3'-phosphate
  modified_base 11: mod_base = OTHER; note = 2'-O-methyladenosine-3'-phosphate
  modified_base 12: mod_base = OTHER; note 2'-O-(1-hexyl-4-methylene-1,2,3-triazolyl)-adenosine-3'-pho sphate
  modified_base 13: mod_base = OTHER; note = 2'-O-methylcytidine-3'-phosphate
  modified_base 14: mod_base = OTHER; note = 2'-fluoroadenosine-3'-phosphate
  modified_base 15: mod_base = OTHER; note = 2'-O-methylguanosine-3'-phosphate
  modified_base 16: mod_base = OTHER; note = 2'-fluoroguanosine-3'-phosphate
  modified_base 17: mod_base = OTHER; note = 2'-O-methyluridine-3'-phosphate
  modified_base 18: mod_base = OTHER; note = 2'-fluorocytidine-3'-phosphate
  modified_base 19: mod_base = OTHER; note = 2'-O-methyluridine-3'-phosphate
  modified_base 20: mod_base = OTHER; note = 2'-fluoroadenosine-3'-phosphate
  modified_base 21: mod_base = OTHER; note = 2'-O-methylguanosine-3'-phosphorothioate
  modified_base 22: mod_base = OTHER; note = 2'-O-methyladenosine-3'-phosphorothioate
  modified_base 23: mod_base = OTHER; note = 2'-O-methyladenosine-3'-phosphate
acaaaagcaaaacaggtctagaa

SEQ ID NO: 649 - RNA, 21 nt, synthetic construct
  source 1..21: mol_type = other RNA; note = Description of Artificial Sequence: Synthetic oligonucleotide
  modified_base 1: mod_base = OTHER; note = 2'-fluorocytidine-3'-phosphorothioate
  modified_base 2: mod_base = OTHER; note = 2'-O-methyluridine-3'-phosphorothioate
  modified_base 3: mod_base = OTHER; note = 2'-fluoroadenosine-3'-phosphate
  modified_base 4: mod_base = OTHER; note = 2'-O-methylguanosine-3'-phosphate
  modified_base 5: mod_base = OTHER; note = 2'-fluoroadenosine-3'-phosphate
  modified_base 6: mod_base = OTHER; note = 2'-O-methylcytidine-3'-phosphate
  modified_base 7: mod_base = OTHER; note = 2'-fluorocytidine-3'-phosphate
  modified_base 8: mod_base = OTHER; note = 2'-O-methyluridine-3'-phosphate
  modified_base 9: mod_base = OTHER; note = 2'-fluoroguanosine-3'-phosphate
  modified_base 10: mod_base = OTHER; note = 2'-fluorouridine-3'-phosphate
  modified_base 11: mod_base = OTHER; note = 2'-fluorouridine-3'-phosphate
  modified_base 12: mod_base = OTHER; note = 2'-O-methyluridine-3'-phosphate
  modified_base 13: mod_base = OTHER; note = 2'-fluorouridine-3'-phosphate
  modified_base 14: mod_base = OTHER; note = 2'-O-methylguanosine-3'-phosphate
  modified_base 15: mod_base = OTHER; note = 2'-fluorocytidine-3'-phosphate
  modified_base 16: mod_base = OTHER; note = 2'-O-methyluridine-3'-phosphate
  modified_base 17: mod_base = OTHER; note = 2'-fluorouridine-3'-phosphate
  modified_base 18: mod_base = OTHER; note = 2'-O-methyluridine-3'-phosphate
  modified_base 19: mod_base = OTHER; note = 2'-fluorouridine-3'-phosphate
  modified_base 20: mod_base = OTHER; note = 2'-O-methylguanosine-3'-phosphate
  modified_base 21: mod_base = OTHER; note = 2'-fluorouridine-3'-phosphate N-[tris(GalNAc-alkyl)-amidodecanoyl)]-4-hydroxyprolinol Hyp-(GalNAc-alkyl)3
ctagacctgttttgcttttgt

SEQ ID NO: 650 - RNA, 23 nt, synthetic construct
  source 1..23: mol_type = other RNA; note = Description of Artificial Sequence: Synthetic oligonucleotide
  modified_base 1: mod_base = OTHER; note = 2'-O-methyladenosine-3'-phosphorothioate
  modified_base 2: mod_base = OTHER; note = 2'-fluorocytidine-3'-phosphorothioate
  modified_base 3: mod_base = OTHER; note = 2'-O-methyladenosine-3'-phosphate
  modified_base 4: mod_base = OTHER; note = 2'-fluoroadenosine-3'-phosphate
  modified_base 5: mod_base = OTHER; note = 2'-O-methyladenosine-3'-phosphate
  modified_base 6: mod_base = OTHER; note = 2'-fluoroadenosine-3'-phosphate
  modified_base 7: mod_base = OTHER; note = 2'-O-methylguanosine-3'-phosphate
  modified_base 8: mod_base = OTHER; note = 2'-fluorocytidine-3'-phosphate
  modified_base 9: mod_base = OTHER; note 2'-O-(1-hexyl-4-methylene-1,2,3-triazolyl)-adenosine-3'-pho sphate
  modified_base 10: mod_base = OTHER; note = 2'-fluoroadenosine-3'-phosphate
  modified_base 11: mod_base = OTHER; note = 2'-O-methyladenosine-3'-phosphate
  modified_base 12: mod_base = OTHER; note = 2'-O-methyladenosine-3'-phosphate
  modified_base 13: mod_base = OTHER; note = 2'-O-methylcytidine-3'-phosphate
  modified_base 14: mod_base = OTHER; note = 2'-fluoroadenosine-3'-phosphate
  modified_base 15: mod_base = OTHER; note 2'-O-(1-hexyl-4-methylene-1,2,3-triazolyl)-guanosine-3'-pho sphate
  modified_base 16: mod_base = OTHER; note = 2'-fluoroguanosine-3'-phosphate
  modified_base 17: mod_base = OTHER; note = 2'-O-methyluridine-3'-phosphate
  modified_base 18: mod_base = OTHER; note = 2'-fluorocytidine-3'-phosphate
  modified_base 19: mod_base = OTHER; note 2'-O-(1-hexyl-4-methylene-1,2,3-triazolyl)-uridine-3'-phosp hate
  modified_base 20: mod_base = OTHER; note = 2'-fluoroadenosine-3'-phosphate
  modified_base 21: mod_base = OTHER; note = 2'-O-methylguanosine-3'-phosphorothioate
  modified_base 22: mod_base = OTHER; note = 2'-O-methyladenosine-3'-phosphorothioate
  modified_base 23: mod_base = OTHER; note = 2'-O-methyladenosine-3'-phosphate
acaaaagcaaaacaggtctagaa

SEQ ID NO: 651 - RNA, 21 nt, synthetic construct
  source 1..21: mol_type = other RNA; note = Description of Artificial Sequence: Synthetic oligonucleotide
  modified_base 1: mod_base = OTHER; note = 2'-fluorocytidine-3'-phosphorothioate
  modified_base 2: mod_base = OTHER; note = 2'-O-methyluridine-3'-phosphorothioate
  modified_base 3: mod_base = OTHER; note 2'-O-(1-hexyl-4-methylene-1,2,3-triazolyl)-adenosine-3'-pho sphate
  modified_base 4: mod_base = OTHER; note 2'-O-(1-hexyl-4-methylene-1,2,3-triazolyl)-guanosine-3'-pho sphate
  modified_base 5: mod_base = OTHER; note 2'-O-(1-hexyl-4-methylene-1,2,3-triazolyl)-adenosine-3'-pho sphate
  modified_base 6: mod_base = OTHER; note 2'-O-(1-hexyl-4-methylene-1,2,3-triazolyl)-cytidine-3'-phos phate
  modified_base 7: mod_base = OTHER; note = 2'-fluorocytidine-3'-phosphate
  modified_base 8: mod_base = OTHER; note = 2'-O-methyluridine-3'-phosphate
  modified_base 9: mod_base = OTHER; note = 2'-fluoroguanosine-3'-phosphate
  modified_base 10: mod_base = OTHER; note = 2'-fluorouridine-3'-phosphate
  modified_base 11: mod_base = OTHER; note = 2'-fluorouridine-3'-phosphate
  modified_base 12: mod_base = OTHER; note = 2'-O-methyluridine-3'-phosphate
  modified_base 13: mod_base = OTHER; note = 2'-fluorouridine-3'-phosphate
  modified_base 14: mod_base = OTHER; note 2'-O-(1-hexyl-4-methylene-1,2,3-triazolyl)-guanosine-3'-pho sphate
  modified_base 15: mod_base = OTHER; note = 2'-fluorocytidine-3'-phosphate
  modified_base 16: mod_base = OTHER; note 2'-O-(1-hexyl-4-methylene-1,2,3-triazolyl)-uridine-3'-phosp hate
  modified_base 17: mod_base = OTHER; note = 2'-fluorouridine-3'-phosphate
  modified_base 18: mod_base = OTHER; note 2'-O-(1-hexyl-4-methylene-1,2,3-triazolyl)-uridine-3'-phosp hate
  modified_base 19: mod_base = OTHER; note = 2'-fluorouridine-3'-phosphate
  modified_base 20: mod_base = OTHER; note 2'-O-(1-hexyl-4-methylene-1,2,3-triazolyl)-guanosine-3'-pho sphate
  modified_base 21: mod_base = OTHER; note = 2'-fluorouridine-3'-phosphate N-[tris(GalNAc-alkyl)-amidodecanoyl)]-4-hydroxyprolinol Hyp-(GalNAc-alkyl)3
ctagacctgttttgcttttgt

SEQ ID NO: 652 - RNA, 23 nt, synthetic construct
  source 1..23: mol_type = other RNA; note = Description of Artificial Sequence: Synthetic oligonucleotide
  modified_base 1: mod_base = OTHER; note = 2'-O-methyladenosine-3'-phosphorothioate
  modified_base 2: mod_base = OTHER; note = 2'-fluorocytidine-3'-phosphorothioate
  modified_base 3: mod_base = OTHER; note = 2'-O-methyladenosine-3'-phosphate
  modified_base 4: mod_base = OTHER; note = 2'-fluoroadenosine-3'-phosphate
  modified_base 5: mod_base = OTHER; note = 2'-O-methyladenosine-3'-phosphate
  modified_base 6: mod_base = OTHER; note = 2'-fluoroadenosine-3'-phosphate
  modified_base 7: mod_base = OTHER; note = 2'-O-methylguanosine-3'-phosphate
  modified_base 8: mod_base = OTHER; note = 2'-fluorocytidine-3'-phosphate
  modified_base 9: mod_base = OTHER; note = 2'-O-methyladenosine-3'-phosphate
  modified_base 10: mod_base = OTHER; note = 2'-fluoroadenosine-3'-phosphate
  modified_base 11: mod_base = OTHER; note = 2'-O-methyladenosine-3'-phosphate
  modified_base 12: mod_base = OTHER; note = 2'-O-methyladenosine-3'-phosphate
  modified_base 13: mod_base = OTHER; note = 2'-O-methylcytidine-3'-phosphate
  modified_base 14: mod_base = OTHER; note = 2'-fluoroadenosine-3'-phosphate
  modified_base 15: mod_base = OTHER; note = 2'-O-methylguanosine-3'-phosphate
  modified_base 16: mod_base = OTHER; note = 2'-fluoroguanosine-3'-phosphate
  modified_base 17: mod_base = OTHER; note = 2'-O-methyluridine-3'-phosphate
  modified_base 18: mod_base = OTHER; note = 2'-fluorocytidine-3'-phosphate
  modified_base 19: mod_base = OTHER; note = 2'-O-methyluridine-3'-phosphate
  modified_base 20: mod_base = OTHER; note = 2'-fluoroadenosine-3'-phosphate
  modified_base 21: mod_base = OTHER; note = 2'-O-methylguanosine-3'-phosphorothioate
  modified_base 22: mod_base = OTHER; note = 2'-O-methyladenosine-3'-phosphorothioate
  modified_base 23: mod_base = OTHER; note = 2'-O-methyladenosine-3'-phosphate
acaaaagcaaaacaggtctagaa

SEQ ID NO: 653 - RNA, 21 nt, synthetic construct
  source 1..21: mol_type = other RNA; note = Description of Artificial Sequence: Synthetic oligonucleotide
  modified_base 1: mod_base = OTHER; note 2'-O-(1-hexyl-4-methylene-1,2,3-triazolyl)-cytidine-3'-phos phate
  modified_base 2: mod_base = OTHER; note = 2'-O-methyluridine-3'-phosphate
  modified_base 3: mod_base = OTHER; note 2'-O-(1-hexyl-4-methylene-1,2,3-triazolyl)-adenosine-3'-pho sphate
  modified_base 4: mod_base = OTHER; note 2'-O-(1-hexyl-4-methylene-1,2,3-triazolyl)-guanosine-3'-pho sphate
  modified_base 5: mod_base = OTHER; note 2'-O-(1-hexyl-4-methylene-1,2,3-triazolyl)-adenosine-3'-pho sphate
  modified_base 6: mod_base = OTHER; note 2'-O-(1-hexyl-4-methylene-1,2,3-triazolyl)-cytidine-3'-phos phate
  modified_base 7: mod_base = OTHER; note = 2'-fluorocytidine-3'-phosphate
  modified_base 8: mod_base = OTHER; note = 2'-O-methyluridine-3'-phosphate
  modified_base 9: mod_base = OTHER; note = 2'-fluoroguanosine-3'-phosphate
  modified_base 10: mod_base = OTHER; note = 2'-fluorouridine-3'-phosphate
  modified_base 11: mod_base = OTHER; note = 2'-fluorouridine-3'-phosphate
  modified_base 12: mod_base = OTHER; note = 2'-O-methyluridine-3'-phosphate
  modified_base 13: mod_base = OTHER; note = 2'-fluorouridine-3'-phosphate
  modified_base 14: mod_base = OTHER; note 2'-O-(1-hexyl-4-methylene-1,2,3-triazolyl)-guanosine-3'-pho sphate
  modified_base 15: mod_base = OTHER; note = 2'-fluorocytidine-3'-phosphate
  modified_base 16: mod_base = OTHER; note 2'-O-(1-hexyl-4-methylene-1,2,3-triazolyl)-uridine-3'-phosp hate
  modified_base 17: mod_base = OTHER; note = 2'-fluorouridine-3'-phosphate
  modified_base 18: mod_base = OTHER; note 2'-O-(1-hexyl-4-methylene-1,2,3-triazolyl)-uridine-3'-phosp hate
  modified_base 19: mod_base = OTHER; note = 2'-fluorouridine-3'-phosphate
  modified_base 20: mod_base = OTHER; note 2'-O-(1-hexyl-4-methylene-1,2,3-triazolyl)-guanosine-3'-pho sphate
  modified_base 21: mod_base = OTHER; note = 2'-fluorouridine-3'-phosphate N-[tris(GalNAc-alkyl)-amidodecanoyl)]-4-hydroxyprolinol Hyp-(GalNAc-alkyl)3
ctagacctgttttgcttttgt

SEQ ID NO: 654 - RNA, 23 nt, synthetic construct
  source 1..23: mol_type = other RNA; note = Description of Artificial Sequence: Synthetic oligonucleotide
  modified_base 1: mod_base = OTHER; note = 2'-O-methyladenosine-3'-phosphorothioate
  modified_base 2: mod_base = OTHER; note = 2'-fluorocytidine-3'-phosphorothioate
  modified_base 3: mod_base = OTHER; note = 2'-O-methyladenosine-3'-phosphate
  modified_base 4: mod_base = OTHER; note = 2'-fluoroadenosine-3'-phosphate
  modified_base 5: mod_base = OTHER; note = 2'-O-methyladenosine-3'-phosphate
  modified_base 6: mod_base = OTHER; note = 2'-fluoroadenosine-3'-phosphate
  modified_base 7: mod_base = OTHER; note = 2'-O-methylguanosine-3'-phosphate
  modified_base 8: mod_base = OTHER; note = 2'-fluorocytidine-3'-phosphate
  modified_base 9: mod_base = OTHER; note = 2'-O-methyladenosine-3'-phosphate
  modified_base 10: mod_base = OTHER; note = 2'-fluoroadenosine-3'-phosphate
  modified_base 11: mod_base = OTHER; note = 2'-O-methyladenosine-3'-phosphate
  modified_base 12: mod_base = OTHER; note = 2'-O-methyladenosine-3'-phosphate
  modified_base 13: mod_base = OTHER; note = 2'-O-methylcytidine-3'-phosphate
  modified_base 14: mod_base = OTHER; note = 2'-fluoroadenosine-3'-phosphate
  modified_base 15: mod_base = OTHER; note = 2'-O-methylguanosine-3'-phosphate
  modified_base 16: mod_base = OTHER; note = 2'-fluoroguanosine-3'-phosphate
  modified_base 17: mod_base = OTHER; note = 2'-O-methyluridine-3'-phosphate
  modified_base 18: mod_base = OTHER; note = 2'-fluorocytidine-3'-phosphate
  modified_base 19: mod_base = OTHER; note = 2'-O-methyluridine-3'-phosphate
  modified_base 20: mod_base = OTHER; note = 2'-fluoroadenosine-3'-phosphate
  modified_base 21: mod_base = OTHER; note = 2'-O-methylguanosine-3'-phosphorothioate
  modified_base 22: mod_base = OTHER; note = 2'-O-methyladenosine-3'-phosphorothioate
  modified_base 23: mod_base = OTHER; note = 2'-O-methyladenosine-3'-phosphate
acaaaagcaaaacaggtctagaa

SEQ ID NO: 655 - RNA, 21 nt, synthetic construct
  source 1..21: mol_type = other RNA; note = Description of Artificial Sequence: Synthetic oligonucleotide
  modified_base 1: mod_base = OTHER; note = 2'-fluorocytidine-3'-phosphorothioate
  modified_base 2: mod_base = OTHER; note = 2'-O-methyluridine-3'-phosphorothioate
  modified_base 3: mod_base = OTHER; note 2'-O-(1-hexyl-4-methylene-1,2,3-triazolyl)-adenosine-3'-pho sphate
  modified_base 4: mod_base = OTHER; note 2'-O-(1-hexyl-4-methylene-1,2,3-triazolyl)-guanosine-3'-pho sphate
  modified_base 5: mod_base = OTHER; note 2'-O-(1-hexyl-4-methylene-1,2,3-triazolyl)-adenosine-3'-pho sphate
  modified_base 6: mod_base = OTHER; note 2'-O-(1-hexyl-4-methylene-1,2,3-triazolyl)-cytidine-3'-phos phate
  modified_base 7: mod_base = OTHER; note = 2'-fluorocytidine-3'-phosphate
  modified_base 8: mod_base = OTHER; note = 2'-O-methyluridine-3'-phosphate
  modified_base 9: mod_base = OTHER; note = 2'-fluoroguanosine-3'-phosphate
  modified_base 10: mod_base = OTHER; note = 2'-fluorouridine-3'-phosphate
  modified_base 11: mod_base = OTHER; note = 2'-fluorouridine-3'-phosphate
  modified_base 12: mod_base = OTHER; note = 2'-O-methyluridine-3'-phosphate
  modified_base 13: mod_base = OTHER; note = 2'-fluorouridine-3'-phosphate
  modified_base 14: mod_base = OTHER; note 2'-O-(1-hexyl-4-methylene-1,2,3-triazolyl)-guanosine-3'-pho sphate
  modified_base 15: mod_base = OTHER; note = 2'-fluorocytidine-3'-phosphate
  modified_base 16: mod_base = OTHER; note 2'-O-(1-hexyl-4-methylene-1,2,3-triazolyl)-uridine-3'-phosp hate
  modified_base 17: mod_base = OTHER; note = 2'-fluorouridine-3'-phosphate
  modified_base 18: mod_base = OTHER; note 2'-O-(1-hexyl-4-methylene-1,2,3-triazolyl)-uridine-3'-phosp hate
  modified_base 19: mod_base = OTHER; note = 2'-fluorouridine-3'-phosphate
  modified_base 20: mod_base = OTHER; note 2'-O-(1-hexyl-4-methylene-1,2,3-triazolyl)-guanosine-3'-pho sphate
  modified_base 21: mod_base = OTHER; note = 2'-fluorouridine-3'-phosphate N-[tris(GalNAc-alkyl)-amidodecanoyl)]-4-hydroxyprolinol Hyp-(GalNAc-alkyl)3
ctagacctgttttgcttttgt

SEQ ID NO: 656 - RNA, 23 nt, synthetic construct
  source 1..23: mol_type = other RNA; note = Description of Artificial Sequence: Synthetic oligonucleotide
  modified_base 1: mod_base = OTHER; note = 2'-O-methyladenosine-3'-phosphorothioate
  modified_base 2: mod_base = OTHER; note = 2'-fluorocytidine-3'-phosphorothioate
  modified_base 3: mod_base = OTHER; note = 2'-O-methyladenosine-3'-phosphate
  modified_base 4: mod_base = OTHER; note = 2'-fluoroadenosine-3'-phosphate
  modified_base 5: mod_base = OTHER; note = 2'-O-methyladenosine-3'-phosphate
  modified_base 6: mod_base = OTHER; note = 2'-fluoroadenosine-3'-phosphate
  modified_base 7: mod_base = OTHER; note = 2'-O-methylguanosine-3'-phosphate
  modified_base 8: mod_base = OTHER; note = 2'-fluorocytidine-3'-phosphate
  modified_base 9: mod_base = OTHER; note 2'-O-(1-hexyl-4-methylene-1,2,3-triazolyl)-adenosine-3'-pho sphate
  modified_base 10: mod_base = OTHER; note = 2'-fluoroadenosine-3'-phosphate
  modified_base 11: mod_base = OTHER; note = 2'-O-methyladenosine-3'-phosphate
  modified_base 12: mod_base = OTHER; note = 2'-O-methyladenosine-3'-phosphate
  modified_base 13: mod_base = OTHER; note = 2'-O-methylcytidine-3'-phosphate
  modified_base 14: mod_base = OTHER; note = 2'-fluoroadenosine-3'-phosphate
  modified_base 15: mod_base = OTHER; note = 2'-O-methylguanosine-3'-phosphate
  modified_base 16: mod_base = OTHER; note = 2'-fluoroguanosine-3'-phosphate
  modified_base 17: mod_base = OTHER; note = 2'-O-methyluridine-3'-phosphate
  modified_base 18: mod_base = OTHER; note = 2'-fluorocytidine-3'-phosphate
  modified_base 19: mod_base = OTHER; note = 2'-O-methyluridine-3'-phosphate
  modified_base 20: mod_base = OTHER; note = 2'-fluoroadenosine-3'-phosphate
  modified_base 21: mod_base = OTHER; note = 2'-O-methylguanosine-3'-phosphorothioate
  modified_base 22: mod_base = OTHER; note = 2'-O-methyladenosine-3'-phosphorothioate
  modified_base 23: mod_base = OTHER; note = 2'-O-methyladenosine-3'-phosphate
acaaaagcaaaacaggtctagaa

SEQ ID NO: 657 - RNA, 21 nt, synthetic construct
  source 1..21: mol_type = other RNA; note = Description of Artificial Sequence: Synthetic oligonucleotide
  modified_base 1: mod_base = OTHER; note = 2'-fluorocytidine-3'-phosphorothioate
  modified_base 2: mod_base = OTHER; note = 2'-O-methyluridine-3'-phosphorothioate
  modified_base 3: mod_base = OTHER; note 2'-O-(1-hexyl-4-methylene-1,2,3-triazolyl)-adenosine-3'-pho sphate
  modified_base 4: mod_base = OTHER; note 2'-O-(1-hexyl-4-methylene-1,2,3-triazolyl)-guanosine-3'-pho sphate
  modified_base 5: mod_base = OTHER; note 2'-O-(1-hexyl-4-methylene-1,2,3-triazolyl)-adenosine-3'-pho sphate
  modified_base 6: mod_base = OTHER; note 2'-O-(1-hexyl-4-methylene-1,2,3-triazolyl)-cytidine-3'-phos phate
  modified_base 7: mod_base = OTHER; note = 2'-fluorocytidine-3'-phosphate
  modified_base 8: mod_base = OTHER; note = 2'-O-methyluridine-3'-phosphate
  modified_base 9: mod_base = OTHER; note = 2'-fluoroguanosine-3'-phosphate
  modified_base 10: mod_base = OTHER; note = 2'-fluorouridine-3'-phosphate
  modified_base 11: mod_base = OTHER; note = 2'-fluorouridine-3'-phosphate
  modified_base 12: mod_base = OTHER; note = 2'-O-methyluridine-3'-phosphate
  modified_base 13: mod_base = OTHER; note = 2'-fluorouridine-3'-phosphate
  modified_base 14: mod_base = OTHER; note 2'-O-(1-hexyl-4-methylene-1,2,3-triazolyl)-guanosine-3'-pho sphate
  modified_base 15: mod_base = OTHER; note = 2'-fluorocytidine-3'-phosphate
  modified_base 16: mod_base = OTHER; note 2'-O-(1-hexyl-4-methylene-1,2,3-triazolyl)-uridine-3'-phosp hate
  modified_base 17: mod_base = OTHER; note = 2'-fluorouridine-3'-phosphate
  modified_base 18: mod_base = OTHER; note 2'-O-(1-hexyl-4-methylene-1,2,3-triazolyl)-uridine-3'-phosp hate
  modified_base 19: mod_base = OTHER; note = 2'-fluorouridine-3'-phosphate
  modified_base 20: mod_base = OTHER; note 2'-O-(1-hexyl-4-methylene-1,2,3-triazolyl)-guanosine-3'-pho sphate
  modified_base 21: mod_base = OTHER; note = 2'-fluorouridine-3'-phosphate N-[tris(GalNAc-alkyl)-amidodecanoyl)]-4-hydroxyprolinol Hyp-(GalNAc-alkyl)3
ctagacctgttttgcttttgt

SEQ ID NO: 658 - RNA, 23 nt, synthetic construct
  source 1..23: mol_type = other RNA; note = Description of Artificial Sequence: Synthetic oligonucleotide
  modified_base 1: mod_base = OTHER; note = 2'-O-methyladenosine-3'-phosphorothioate
  modified_base 2: mod_base = OTHER; note = 2'-fluorocytidine-3'-phosphorothioate
  modified_base 3: mod_base = OTHER; note = 2'-O-methyladenosine-3'-phosphate
  modified_base 4: mod_base = OTHER; note = 2'-fluoroadenosine-3'-phosphate
  modified_base 5: mod_base = OTHER; note = 2'-O-methyladenosine-3'-phosphate
  modified_base 6: mod_base = OTHER; note = 2'-fluoroadenosine-3'-phosphate
  modified_base 7: mod_base = OTHER; note = 2'-O-methylguanosine-3'-phosphate
  modified_base 8: mod_base = OTHER; note = 2'-fluorocytidine-3'-phosphate
  modified_base 9: mod_base = OTHER; note = 2'-O-methyladenosine-3'-phosphate
  modified_base 10: mod_base = OTHER; note 2'-O-(1-hexyl-4-methylene-1,2,3-triazolyl)-adenosine-3'-pho sphate
  modified_base 11: mod_base = OTHER; note = 2'-O-methyladenosine-3'-phosphate
  modified_base 12: mod_base = OTHER; note = 2'-O-methyladenosine-3'-phosphate
  modified_base 13: mod_base = OTHER; note = 2'-O-methylcytidine-3'-phosphate
  modified_base 14: mod_base = OTHER; note = 2'-fluoroadenosine-3'-phosphate
  modified_base 15: mod_base = OTHER; note = 2'-O-methylguanosine-3'-phosphate
  modified_base 16: mod_base = OTHER; note = 2'-fluoroguanosine-3'-phosphate
  modified_base 17: mod_base = OTHER; note = 2'-O-methyluridine-3'-phosphate
  modified_base 18: mod_base = OTHER; note = 2'-fluorocytidine-3'-phosphate
  modified_base 19: mod_base = OTHER; note = 2'-O-methyluridine-3'-phosphate
  modified_base 20: mod_base = OTHER; note = 2'-fluoroadenosine-3'-phosphate
  modified_base 21: mod_base = OTHER; note = 2'-O-methylguanosine-3'-phosphorothioate
  modified_base 22: mod_base = OTHER; note = 2'-O-methyladenosine-3'-phosphorothioate
  modified_base 23: mod_base = OTHER; note = 2'-O-methyladenosine-3'-phosphate
acaaaagcaaaacaggtctagaa

SEQ ID NO: 659 - RNA, 21 nt, synthetic construct
  source 1..21: mol_type = other RNA; note = Description of Artificial Sequence: Synthetic oligonucleotide
  modified_base 1: mod_base = OTHER; note = 2'-fluorocytidine-3'-phosphorothioate
  modified_base 2: mod_base = OTHER; note = 2'-O-methyluridine-3'-phosphorothioate
  modified_base 3: mod_base = OTHER; note 2'-O-(1-hexyl-4-methylene-1,2,3-triazolyl)-adenosine-3'-pho sphate
  modified_base 4: mod_base = OTHER; note 2'-O-(1-hexyl-4-methylene-1,2,3-triazolyl)-guanosine-3'-pho sphate
  modified_base 5: mod_base = OTHER; note 2'-O-(1-hexyl-4-methylene-1,2,3-triazolyl)-adenosine-3'-pho sphate
  modified_base 6: mod_base = OTHER; note 2'-O-(1-hexyl-4-methylene-1,2,3-triazolyl)-cytidine-3'-phos phate
  modified_base 7: mod_base = OTHER; note = 2'-fluorocytidine-3'-phosphate
  modified_base 8: mod_base = OTHER; note = 2'-O-methyluridine-3'-phosphate
  modified_base 9: mod_base = OTHER; note = 2'-fluoroguanosine-3'-phosphate
  modified_base 10: mod_base = OTHER; note = 2'-fluorouridine-3'-phosphate
  modified_base 11: mod_base = OTHER; note = 2'-fluorouridine-3'-phosphate
  modified_base 12: mod_base = OTHER; note = 2'-O-methyluridine-3'-phosphate
  modified_base 13: mod_base = OTHER; note = 2'-fluorouridine-3'-phosphate
  modified_base 14: mod_base = OTHER; note 2'-O-(1-hexyl-4-methylene-1,2,3-triazolyl)-guanosine-3'-pho sphate
  modified_base 15: mod_base = OTHER; note = 2'-fluorocytidine-3'-phosphate
  modified_base 16: mod_base = OTHER; note 2'-O-(1-hexyl-4-methylene-1,2,3-triazolyl)-uridine-3'-phosp hate
  modified_base 17: mod_base = OTHER; note = 2'-fluorouridine-3'-phosphate
  modified_base 18: mod_base = OTHER; note 2'-O-(1-hexyl-4-methylene-1,2,3-triazolyl)-uridine-3'-phosp hate
  modified_base 19: mod_base = OTHER; note = 2'-fluorouridine-3'-phosphate
  modified_base 20: mod_base = OTHER; note 2'-O-(1-hexyl-4-methylene-1,2,3-triazolyl)-guanosine-3'-pho sphate
  modified_base 21: mod_base = OTHER; note = 2'-fluorouridine-3'-phosphate N-[tris(GalNAc-alkyl)-amidodecanoyl)]-4-hydroxyprolinol Hyp-(GalNAc-alkyl)3
ctagacctgttttgcttttgt

SEQ ID NO: 660 - RNA, 23 nt, synthetic construct
  source 1..23: mol_type = other RNA; note = Description of Artificial Sequence: Synthetic oligonucleotide
  modified_base 1: mod_base = OTHER; note = 2'-O-methyladenosine-3'-phosphorothioate
  modified_base 2: mod_base = OTHER; note = 2'-fluorocytidine-3'-phosphorothioate
  modified_base 3: mod_base = OTHER; note = 2'-O-methyladenosine-3'-phosphate
  modified_base 4: mod_base = OTHER; note = 2'-fluoroadenosine-3'-phosphate
  modified_base 5: mod_base = OTHER; note = 2'-O-methyladenosine-3'-phosphate
  modified_base 6: mod_base = OTHER; note = 2'-fluoroadenosine-3'-phosphate
  modified_base 7: mod_base = OTHER; note = 2'-O-methylguanosine-3'-phosphate
  modified_base 8: mod_base = OTHER; note = 2'-fluorocytidine-3'-phosphate
  modified_base 9: mod_base = OTHER; note = 2'-O-methyladenosine-3'-phosphate
  modified_base 10: mod_base = OTHER; note = 2'-fluoroadenosine-3'-phosphate
  modified_base 11: mod_base = OTHER; note 2'-O-(1-hexyl-4-methylene-1,2,3-triazolyl)-adenosine-3'-pho sphate
  modified_base 12: mod_base = OTHER; note = 2'-O-methyladenosine-3'-phosphate
  modified_base 13: mod_base = OTHER; note = 2'-O-methylcytidine-3'-phosphate
  modified_base 14: mod_base = OTHER; note = 2'-fluoroadenosine-3'-phosphate
  modified_base 15: mod_base = OTHER; note = 2'-O-methylguanosine-3'-phosphate
  modified_base 16: mod_base = OTHER; note = 2'-fluoroguanosine-3'-phosphate
  modified_base 17: mod_base = OTHER; note = 2'-O-methyluridine-3'-phosphate
  modified_base 18: mod_base = OTHER; note = 2'-fluorocytidine-3'-phosphate
  modified_base 19: mod_base = OTHER; note = 2'-O-methyluridine-3'-phosphate
  modified_base 20: mod_base = OTHER; note = 2'-fluoroadenosine-3'-phosphate
  modified_base 21: mod_base = OTHER; note = 2'-O-methylguanosine-3'-phosphorothioate
  modified_base 22: mod_base = OTHER; note = 2'-O-methyladenosine-3'-phosphorothioate
  modified_base 23: mod_base = OTHER; note = 2'-O-methyladenosine-3'-phosphate
acaaaagcaaaacaggtctagaa

SEQ ID NO: 661 - RNA, 21 nt, synthetic construct
  source 1..21: mol_type = other RNA; note = Description of Artificial Sequence: Synthetic oligonucleotide
  modified_base 1: mod_base = OTHER; note = 2'-fluorocytidine-3'-phosphorothioate
  modified_base 2: mod_base = OTHER; note = 2'-O-methyluridine-3'-phosphorothioate
  modified_base 3: mod_base = OTHER; note = 2'-fluoroadenosine-3'-phosphate
  modified_base 4: mod_base = OTHER; note = 2'-O-methylguanosine-3'-phosphate
  modified_base 5: mod_base = OTHER; note = 2'-fluoroadenosine-3'-phosphate
  modified_base 6: mod_base = OTHER; note = 2'-O-methylcytidine-3'-phosphate
  modified_base 7: mod_base = OTHER; note = 2'-fluorocytidine-3'-phosphate
  modified_base 8: mod_base = OTHER; note = 2'-O-methyluridine-3'-phosphate
  modified_base 9: mod_base = OTHER; note = 2'-fluoroguanosine-3'-phosphate
  modified_base 10: mod_base = OTHER; note = 2'-fluorouridine-3'-phosphate
  modified_base 11: mod_base = OTHER; note = 2'-fluorouridine-3'-phosphate
  modified_base 12: mod_base = OTHER; note = 2'-O-methyluridine-3'-phosphate
  modified_base 13: mod_base = OTHER; note = 2'-fluorouridine-3'-phosphate
  modified_base 14: mod_base = OTHER; note = 2'-O-methylguanosine-3'-phosphate
  modified_base 15: mod_base = OTHER; note = 2'-fluorocytidine-3'-phosphate
  modified_base 16: mod_base = OTHER; note = 2'-O-methyluridine-3'-phosphate
  modified_base 17: mod_base = OTHER; note = 2'-fluorouridine-3'-phosphate
  modified_base 18: mod_base = OTHER; note = 2'-O-methyluridine-3'-phosphate
  modified_base 19: mod_base = OTHER; note = 2'-fluorouridine-3'-phosphate
  modified_base 20: mod_base = OTHER; note = 2'-O-methylguanosine-3'-phosphate
  modified_base 21: mod_base = OTHER; note = 2'-fluorouridine-3'-phosphate N-[tris(GalNAc-alkyl)-amidodecanoyl)]-4-hydroxyprolinol Hyp-(GalNAc-alkyl)3
ctagacctgttttgcttttgt

SEQ ID NO: 662 - RNA, 23 nt, synthetic construct
  source 1..23: mol_type = other RNA; note = Description of Artificial Sequence: Synthetic oligonucleotide
  modified_base 1: mod_base = OTHER; note = 2'-O-methyladenosine-3'-phosphorothioate
  modified_base 2: mod_base = OTHER; note = 2'-fluorocytidine-3'-phosphorothioate
  modified_base 3: mod_base = OTHER; note = 2'-O-methyladenosine-3'-phosphate
  modified_base 4: mod_base = OTHER; note = 2'-fluoroadenosine-3'-phosphate
  modified_base 5: mod_base = OTHER; note = 2'-O-methyladenosine-3'-phosphate
  modified_base 6: mod_base = OTHER; note = 2'-fluoroadenosine-3'-phosphate
  modified_base 7: mod_base = OTHER; note = 2'-O-methylguanosine-3'-phosphate
  modified_base 8: mod_base = OTHER; note = 2'-fluorocytidine-3'-phosphate
  modified_base 9: mod_base = OTHER; note = 2'-O-methyladenosine-3'-phosphate
  modified_base 10: mod_base = OTHER; note = 2'-fluoroadenosine-3'-phosphate
  modified_base 11: mod_base = OTHER; note = 2'-O-methyladenosine-3'-phosphate
  modified_base 12: mod_base = OTHER; note = 2'-O-methyladenosine-3'-phosphate
  modified_base 13: mod_base = OTHER; note = 2'-O-methylcytidine-3'-phosphate
  modified_base 14: mod_base = OTHER; note = 2'-fluoroadenosine-3'-phosphate
  modified_base 15: mod_base = OTHER; note = 2'-O-methylguanosine-3'-phosphate
  modified_base 16: mod_base = OTHER; note = 2'-fluoroguanosine-3'-phosphate
  modified_base 17: mod_base = OTHER; note = 2'-O-methyluridine-3'-phosphate
  modified_base 18: mod_base = OTHER; note = 2'-fluorocytidine-3'-phosphate
  modified_base 19: mod_base = OTHER; note = 2'-O-methyluridine-3'-phosphate
  modified_base 20: mod_base = OTHER; note = 2'-fluoroadenosine-3'-phosphate
  modified_base 21: mod_base = OTHER; note = 2'-O-methylguanosine-3'-phosphorothioate
  modified_base 22: mod_base = OTHER; note = 2'-O-methyladenosine-3'-phosphorothioate
  modified_base 23: mod_base = OTHER; note = 2'-O-methyladenosine-3'-phosphate
acaaaagcaaaacaggtctagaa

SEQ ID NO: 663 - RNA, 21 nt, synthetic construct
  source 1..21: mol_type = other RNA; note = Description of Artificial Sequence: Synthetic oligonucleotide
  modified_base 1: mod_base = OTHER; note = 2'-fluorocytidine-3'-phosphorothioate
  modified_base 2: mod_base = OTHER; note = 2'-O-methyluridine-3'-phosphorothioate
  modified_base 3: mod_base = OTHER; note 2'-O-(1-hexyl-4-methylene-1,2,3-triazolyl)-adenosine-3'-pho sphate
  modified_base 4: mod_base = OTHER; note 2'-O-(1-hexyl-4-methylene-1,2,3-triazolyl)-guanosine-3'-pho sphate
  modified_base 5: mod_base = OTHER; note 2'-O-(1-hexyl-4-methylene-1,2,3-triazolyl)-adenosine-3'-pho sphate
  modified_base 6: mod_base = OTHER; note 2'-O-(1-hexyl-4-methylene-1,2,3-triazolyl)-cytidine-3'-phos phate
  modified_base 7: mod_base = OTHER; note = 2'-fluorocytidine-3'-phosphate
  modified_base 8: mod_base = OTHER; note = 2'-O-methyluridine-3'-phosphate
  modified_base 9: mod_base = OTHER; note = 2'-fluoroguanosine-3'-phosphate
  modified_base 10: mod_base = OTHER; note = 2'-fluorouridine-3'-phosphate
  modified_base 11: mod_base = OTHER; note = 2'-fluorouridine-3'-phosphate
  modified_base 12: mod_base = OTHER; note = 2'-O-methyluridine-3'-phosphate
  modified_base 13: mod_base = OTHER; note = 2'-fluorouridine-3'-phosphate
  modified_base 14: mod_base = OTHER; note 2'-O-(1-hexyl-4-methylene-1,2,3-triazolyl)-guanosine-3'-pho sphate
  modified_base 15: mod_base = OTHER; note = 2'-fluorocytidine-3'-phosphate
  modified_base 16: mod_base = OTHER; note 2'-O-(1-hexyl-4-methylene-1,2,3-triazolyl)-uridine-3'-phosp hate
  modified_base 17: mod_base = OTHER; note = 2'-fluorouridine-3'-phosphate
  modified_base 18: mod_base = OTHER; note 2'-O-(1-hexyl-4-methylene-1,2,3-triazolyl)-uridine-3'-phosp hate
  modified_base 19: mod_base = OTHER; note = 2'-fluorouridine-3'-phosphate
  modified_base 20: mod_base = OTHER; note 2'-O-(1-hexyl-4-methylene-1,2,3-triazolyl)-guanosine-3'-pho sphate
  modified_base 21: mod_base = OTHER; note = 2'-fluorouridine-3'-phosphate N-[tris(GalNAc-alkyl)-amidodecanoyl)]-4-hydroxyprolinol Hyp-(GalNAc-alkyl)3
ctagacctgttttgcttttgt

SEQ ID NO: 664 - RNA, 23 nt, synthetic construct
  source 1..23: mol_type = other RNA; note = Description of Artificial Sequence: Synthetic oligonucleotide
  modified_base 1: mod_base = OTHER; note = 2'-O-methyladenosine-3'-phosphorothioate
  modified_base 2: mod_base = OTHER; note = 2'-fluorocytidine-3'-phosphorothioate
  modified_base 3: mod_base = OTHER; note = 2'-O-methyladenosine-3'-phosphate
  modified_base 4: mod_base = OTHER; note = 2'-fluoroadenosine-3'-phosphate
  modified_base 5: mod_base = OTHER; note = 2'-O-methyladenosine-3'-phosphate
  modified_base 6: mod_base = OTHER; note = 2'-fluoroadenosine-3'-phosphate
  modified_base 7: mod_base = OTHER; note = 2'-O-methylguanosine-3'-phosphate
  modified_base 8: mod_base = OTHER; note = 2'-fluorocytidine-3'-phosphate
  modified_base 9: mod_base = OTHER; note = 2'-O-methyladenosine-3'-phosphate
  modified_base 10: mod_base = OTHER; note = 2'-fluoroadenosine-3'-phosphate
  modified_base 11: mod_base = OTHER; note = 2'-O-methyladenosine-3'-phosphate
  modified_base 12: mod_base = OTHER; note 2'-O-(1-hexyl-4-methylene-1,2,3-triazolyl)-adenosine-3'-pho sphate
  modified_base 13: mod_base = OTHER; note = 2'-O-methylcytidine-3'-phosphate
  modified_base 14: mod_base = OTHER; note = 2'-fluoroadenosine-3'-phosphate
  modified_base 15: mod_base = OTHER; note = 2'-O-methylguanosine-3'-phosphate
  modified_base 16: mod_base = OTHER; note = 2'-fluoroguanosine-3'-phosphate
  modified_base 17: mod_base = OTHER; note = 2'-O-methyluridine-3'-phosphate
  modified_base 18: mod_base = OTHER; note = 2'-fluorocytidine-3'-phosphate
  modified_base 19: mod_base = OTHER; note = 2'-O-methyluridine-3'-phosphate
  modified_base 20: mod_base = OTHER; note = 2'-fluoroadenosine-3'-phosphate
  modified_base 21: mod_base = OTHER; note = 2'-O-methylguanosine-3'-phosphorothioate
  modified_base 22: mod_base = OTHER; note = 2'-O-methyladenosine-3'-phosphorothioate
  modified_base 23: mod_base = OTHER; note = 2'-O-methyladenosine-3'-phosphate
acaaaagcaaaacaggtctagaa

SEQ ID NO: 665 - RNA, 21 nt, synthetic construct
  source 1..21: mol_type = other RNA; note = Description of Artificial Sequence: Synthetic oligonucleotide
  modified_base 1: mod_base = OTHER; note = 2'-fluorocytidine-3'-phosphorothioate
  modified_base 2: mod_base = OTHER; note = 2'-O-methyluridine-3'-phosphorothioate
  modified_base 3: mod_base = OTHER; note 2'-O-(1-hexyl-4-methylene-1,2,3-triazolyl)-adenosine-3'-pho sphate
  modified_base 4: mod_base = OTHER; note 2'-O-(1-hexyl-4-methylene-1,2,3-triazolyl)-guanosine-3'-pho sphate
  modified_base 5: mod_base = OTHER; note 2'-O-(1-hexyl-4-methylene-1,2,3-triazolyl)-adenosine-3'-pho sphate
  modified_base 6: mod_base = OTHER; note 2'-O-(1-hexyl-4-methylene-1,2,3-triazolyl)-cytidine-3'-phos phate
  modified_base 7: mod_base = OTHER; note = 2'-fluorocytidine-3'-phosphate
  modified_base 8: mod_base = OTHER; note = 2'-O-methyluridine-3'-phosphate
  modified_base 9: mod_base = OTHER; note = 2'-fluoroguanosine-3'-phosphate
  modified_base 10: mod_base = OTHER; note = 2'-fluorouridine-3'-phosphate
  modified_base 11: mod_base = OTHER; note = 2'-fluorouridine-3'-phosphate
  modified_base 12: mod_base = OTHER; note = 2'-O-methyluridine-3'-phosphate
  modified_base 13: mod_base = OTHER; note = 2'-fluorouridine-3'-phosphate
  modified_base 14: mod_base = OTHER; note 2'-O-(1-hexyl-4-methylene-1,2,3-triazolyl)-guanosine-3'-pho sphate
  modified_base 15: mod_base = OTHER; note = 2'-fluorocytidine-3'-phosphate
  modified_base 16: mod_base = OTHER; note 2'-O-(1-hexyl-4-methylene-1,2,3-triazolyl)-uridine-3'-phosp hate
  modified_base 17: mod_base = OTHER; note = 2'-fluorouridine-3'-phosphate
  modified_base 18: mod_base = OTHER; note 2'-O-(1-hexyl-4-methylene-1,2,3-triazolyl)-uridine-3'-phosp hate
  modified_base 19: mod_base = OTHER; note = 2'-fluorouridine-3'-phosphate
  modified_base 20: mod_base = OTHER; note 2'-O-(1-hexyl-4-methylene-1,2,3-triazolyl)-guanosine-3'-pho sphate
  modified_base 21: mod_base = OTHER; note = 2'-fluorouridine-3'-phosphate N-[tris(GalNAc-alkyl)-amidodecanoyl)]-4-hydroxyprolinol Hyp-(GalNAc-alkyl)3
ctagacctgttttgcttttgt

SEQ ID NO: 666 - RNA, 23 nt, synthetic construct
  source 1..23: mol_type = other RNA; note = Description of Artificial Sequence: Synthetic oligonucleotide
  modified_base 1: mod_base = OTHER; note = 2'-O-methyladenosine-3'-phosphorothioate
  modified_base 2: mod_base = OTHER; note = 2'-fluorocytidine-3'-phosphorothioate
  modified_base 3: mod_base = OTHER; note = 2'-O-methyladenosine-3'-phosphate
  modified_base 4: mod_base = OTHER; note = 2'-fluoroadenosine-3'-phosphate
  modified_base 5: mod_base = OTHER; note = 2'-O-methyladenosine-3'-phosphate
  modified_base 6: mod_base = OTHER; note = 2'-fluoroadenosine-3'-phosphate
  modified_base 7: mod_base = OTHER; note = 2'-O-methylguanosine-3'-phosphate
  modified_base 8: mod_base = OTHER; note = 2'-fluorocytidine-3'-phosphate
  modified_base 9: mod_base = OTHER; note 2'-O-(1-hexyl-4-methylene-1,2,3-triazolyl)-adenosine-3'-pho sphate
  modified_base 10: mod_base = OTHER; note = 2'-fluoroadenosine-3'-phosphate
  modified_base 11: mod_base = OTHER; note = 2'-O-methyladenosine-3'-phosphate
  modified_base 12: mod_base = OTHER; note = 2'-O-methyladenosine-3'-phosphate
  modified_base 13: mod_base = OTHER; note = 2'-O-methylcytidine-3'-phosphate
  modified_base 14: mod_base = OTHER; note = 2'-fluoroadenosine-3'-phosphate
  modified_base 15: mod_base = OTHER; note 2'-O-(1-hexyl-4-methylene-1,2,3-triazolyl)-guanosine-3'-pho sphate
  modified_base 16: mod_base = OTHER; note = 2'-fluoroguanosine-3'-phosphate
  modified_base 17: mod_base = OTHER; note = 2'-O-methyluridine-3'-phosphate
  modified_base 18: mod_base = OTHER; note = 2'-fluorocytidine-3'-phosphate
  modified_base 19: mod_base = OTHER; note 2'-O-(1-hexyl-4-methylene-1,2,3-triazolyl)-uridine-3'-phosp hate
  modified_base 20: mod_base = OTHER; note = 2'-fluoroadenosine-3'-phosphate
  modified_base 21: mod_base = OTHER; note = 2'-O-methylguanosine-3'-phosphorothioate
  modified_base 22: mod_base = OTHER; note = 2'-O-methyladenosine-3'-phosphorothioate
  modified_base 23: mod_base = OTHER; note = 2'-O-methyladenosine-3'-phosphate
acaaaagcaaaacaggtctagaa

SEQ ID NO: 667 - RNA, 21 nt, synthetic construct
  source 1..21: mol_type = other RNA; note = Description of Artificial Sequence: Synthetic oligonucleotide
  modified_base 1: mod_base = OTHER; note 2'-O-(1-hexyl-4-methylene-1,2,3-triazolyl)-cytidine-3'-phos phate
  modified_base 2: mod_base = OTHER; note = 2'-O-methyluridine-3'-phosphate
  modified_base 3: mod_base = OTHER; note 2'-O-(1-hexyl-4-methylene-1,2,3-triazolyl)-adenosine-3'-pho sphate
  modified_base 4: mod_base = OTHER; note 2'-O-(1-hexyl-4-methylene-1,2,3-triazolyl)-guanosine-3'-pho sphate
  modified_base 5: mod_base = OTHER; note 2'-O-(1-hexyl-4-methylene-1,2,3-triazolyl)-adenosine-3'-pho sphate
  modified_base 6: mod_base = OTHER; note 2'-O-(1-hexyl-4-methylene-1,2,3-triazolyl)-cytidine-3'-phos phate
  modified_base 7: mod_base = OTHER; note = 2'-fluorocytidine-3'-phosphate
  modified_base 8: mod_base = OTHER; note = 2'-O-methyluridine-3'-phosphate
  modified_base 9: mod_base = OTHER; note = 2'-fluoroguanosine-3'-phosphate
  modified_base 10: mod_base = OTHER; note = 2'-fluorouridine-3'-phosphate
  modified_base 11: mod_base = OTHER; note = 2'-fluorouridine-3'-phosphate
  modified_base 12: mod_base = OTHER; note = 2'-O-methyluridine-3'-phosphate
  modified_base 13: mod_base = OTHER; note = 2'-fluorouridine-3'-phosphate
  modified_base 14: mod_base = OTHER; note 2'-O-(1-hexyl-4-methylene-1,2,3-triazolyl)-guanosine-3'-pho sphate
  modified_base 15: mod_base = OTHER; note = 2'-fluorocytidine-3'-phosphate
  modified_base 16: mod_base = OTHER; note 2'-O-(1-hexyl-4-methylene-1,2,3-triazolyl)-uridine-3'-phosp hate
  modified_base 17: mod_base = OTHER; note = 2'-fluorouridine-3'-phosphate
  modified_base 18: mod_base = OTHER; note 2'-O-(1-hexyl-4-methylene-1,2,3-triazolyl)-uridine-3'-phosp hate
  modified_base 19: mod_base = OTHER; note = 2'-fluorouridine-3'-phosphate
  modified_base 20: mod_base = OTHER; note 2'-O-(1-hexyl-4-methylene-1,2,3-triazolyl)-guanosine-3'-pho sphate
  modified_base 21: mod_base = OTHER; note = 2'-fluorouridine-3'-phosphate N-[tris(GalNAc-alkyl)-amidodecanoyl)]-4-hydroxyprolinol Hyp-(GalNAc-alkyl)3
ctagacctgttttgcttttgt

SEQ ID NO: 668 - RNA, 23 nt, synthetic construct
  source 1..23: mol_type = other RNA; note = Description of Artificial Sequence: Synthetic oligonucleotide
  modified_base 1: mod_base = OTHER; note = 2'-O-methyladenosine-3'-phosphorothioate
  modified_base 2: mod_base = OTHER; note = 2'-fluorocytidine-3'-phosphorothioate
  modified_base 3: mod_base = OTHER; note = 2'-O-methyladenosine-3'-phosphate
  modified_base 4: mod_base = OTHER; note = 2'-fluoroadenosine-3'-phosphate
  modified_base 5: mod_base = OTHER; note = 2'-O-methyladenosine-3'-phosphate
  modified_base 6: mod_base = OTHER; note = 2'-fluoroadenosine-3'-phosphate
  modified_base 7: mod_base = OTHER; note = 2'-O-methylguanosine-3'-phosphate
  modified_base 8: mod_base = OTHER; note = 2'-fluorocytidine-3'-phosphate
  modified_base 9: mod_base = OTHER; note 2'-O-(1-hexyl-4-methylene-1,2,3-triazolyl)-adenosine-3'-pho sphate
  modified_base 10: mod_base = OTHER; note = 2'-fluoroadenosine-3'-phosphate
  modified_base 11: mod_base = OTHER; note = 2'-O-methyladenosine-3'-phosphate
  modified_base 12: mod_base = OTHER; note = 2'-O-methyladenosine-3'-phosphate
  modified_base 13: mod_base = OTHER; note = 2'-O-methylcytidine-3'-phosphate
  modified_base 14: mod_base = OTHER; note = 2'-fluoroadenosine-3'-phosphate
  modified_base 15: mod_base = OTHER; note = 2'-O-methylguanosine-3'-phosphate
  modified_base 16: mod_base = OTHER; note = 2'-fluoroguanosine-3'-phosphate
  modified_base 17: mod_base = OTHER; note = 2'-O-methyluridine-3'-phosphate
  modified_base 18: mod_base = OTHER; note = 2'-fluorocytidine-3'-phosphate
  modified_base 19: mod_base = OTHER; note = 2'-O-methyluridine-3'-phosphate
  modified_base 20: mod_base = OTHER; note = 2'-fluoroadenosine-3'-phosphate
  modified_base 21: mod_base = OTHER; note = 2'-O-methylguanosine-3'-phosphorothioate
  modified_base 22: mod_base = OTHER; note = 2'-O-methyladenosine-3'-phosphorothioate
  modified_base 23: mod_base = OTHER; note = 2'-O-methyladenosine-3'-phosphate
acaaaagcaaaacaggtctagaa

SEQ ID NO: 669 - RNA, 21 nt, synthetic construct
  source 1..21: mol_type = other RNA; note = Description of Artificial Sequence: Synthetic oligonucleotide
  modified_base 1: mod_base = OTHER; note 2'-O-(1-hexyl-4-methylene-1,2,3-triazolyl)-cytidine-3'-phos phate
  modified_base 2: mod_base = OTHER; note = 2'-O-methyluridine-3'-phosphate
  modified_base 3: mod_base = OTHER; note 2'-O-(1-hexyl-4-methylene-1,2,3-triazolyl)-adenosine-3'-pho sphate
  modified_base 4: mod_base = OTHER; note 2'-O-(1-hexyl-4-methylene-1,2,3-triazolyl)-guanosine-3'-pho sphate
  modified_base 5: mod_base = OTHER; note 2'-O-(1-hexyl-4-methylene-1,2,3-triazolyl)-adenosine-3'-pho sphate
  modified_base 6: mod_base = OTHER; note 2'-O-(1-hexyl-4-methylene-1,2,3-triazolyl)-cytidine-3'-phos phate
  modified_base 7: mod_base = OTHER; note = 2'-fluorocytidine-3'-phosphate
  modified_base 8: mod_base = OTHER; note = 2'-O-methyluridine-3'-phosphate
  modified_base 9: mod_base = OTHER; note = 2'-fluoroguanosine-3'-phosphate
  modified_base 10: mod_base = OTHER; note = 2'-fluorouridine-3'-phosphate
  modified_base 11: mod_base = OTHER; note = 2'-fluorouridine-3'-phosphate
  modified_base 12: mod_base = OTHER; note = 2'-O-methyluridine-3'-phosphate
  modified_base 13: mod_base = OTHER; note = 2'-fluorouridine-3'-phosphate
  modified_base 14: mod_base = OTHER; note 2'-O-(1-hexyl-4-methylene-1,2,3-triazolyl)-guanosine-3'-pho sphate
  modified_base 15: mod_base = OTHER; note = 2'-fluorocytidine-3'-phosphate
  modified_base 16: mod_base = OTHER; note 2'-O-(1-hexyl-4-methylene-1,2,3-triazolyl)-uridine-3'-phosp hate
  modified_base 17: mod_base = OTHER; note = 2'-fluorouridine-3'-phosphate
  modified_base 18: mod_base = OTHER; note 2'-O-(1-hexyl-4-methylene-1,2,3-triazolyl)-uridine-3'-phosp hate
  modified_base 19: mod_base = OTHER; note = 2'-fluorouridine-3'-phosphate
  modified_base 20: mod_base = OTHER; note 2'-O-(1-hexyl-4-methylene-1,2,3-triazolyl)-guanosine-3'-pho sphate
  modified_base 21: mod_base = OTHER; note = 2'-fluorouridine-3'-phosphate N-[tris(GalNAc-alkyl)-amidodecanoyl)]-4-hydroxyprolinol Hyp-(GalNAc-alkyl)3
ctagacctgttttgcttttgt

SEQ ID NO: 670 - RNA, 23 nt, synthetic construct
  source 1..23: mol_type = other RNA; note = Description of Artificial Sequence: Synthetic oligonucleotide
  modified_base 1: mod_base = OTHER; note = 2'-O-methyladenosine-3'-phosphorothioate
  modified_base 2: mod_base = OTHER; note = 2'-fluorocytidine-3'-phosphorothioate
  modified_base 3: mod_base = OTHER; note = 2'-O-methyladenosine-3'-phosphate
  modified_base 4: mod_base = OTHER; note = 2'-fluoroadenosine-3'-phosphate
  modified_base 5: mod_base = OTHER; note = 2'-O-methyladenosine-3'-phosphate
  modified_base 6: mod_base = OTHER; note = 2'-fluoroadenosine-3'-phosphate
  modified_base 7: mod_base = OTHER; note = 2'-O-methylguanosine-3'-phosphate
  modified_base 8: mod_base = OTHER; note = 2'-fluorocytidine-3'-phosphate
  modified_base 9: mod_base = OTHER; note = 2'-O-methyladenosine-3'-phosphate
  modified_base 10: mod_base = OTHER; note 2'-O-(1-hexyl-4-methylene-1,2,3-triazolyl)-adenosine-3'-pho sphate
  modified_base 11: mod_base = OTHER; note = 2'-O-methyladenosine-3'-phosphate
  modified_base 12: mod_base = OTHER; note = 2'-O-methyladenosine-3'-phosphate
  modified_base 13: mod_base = OTHER; note = 2'-O-methylcytidine-3'-phosphate
  modified_base 14: mod_base = OTHER; note = 2'-fluoroadenosine-3'-phosphate
  modified_base 15: mod_base = OTHER; note = 2'-O-methylguanosine-3'-phosphate
  modified_base 16: mod_base = OTHER; note = 2'-fluoroguanosine-3'-phosphate
  modified_base 17: mod_base = OTHER; note = 2'-O-methyluridine-3'-phosphate
  modified_base 18: mod_base = OTHER; note = 2'-fluorocytidine-3'-phosphate
  modified_base 19: mod_base = OTHER; note = 2'-O-methyluridine-3'-phosphate
  modified_base 20: mod_base = OTHER; note = 2'-fluoroadenosine-3'-phosphate
  modified_base 21: mod_base = OTHER; note = 2'-O-methylguanosine-3'-phosphorothioate
  modified_base 22: mod_base = OTHER; note = 2'-O-methyladenosine-3'-phosphorothioate
  modified_base 23: mod_base = OTHER; note = 2'-O-methyladenosine-3'-phosphate
acaaaagcaaaacaggtctagaa

SEQ ID NO: 671 - RNA, 21 nt, synthetic construct
  source 1..21: mol_type = other RNA; note = Description of Artificial Sequence: Synthetic oligonucleotide
  modified_base 1: mod_base = OTHER; note 2'-O-(1-hexyl-4-methylene-1,2,3-triazolyl)-cytidine-3'-phos phate
  modified_base 2: mod_base = OTHER; note = 2'-O-methyluridine-3'-phosphate
  modified_base 3: mod_base = OTHER; note 2'-O-(1-hexyl-4-methylene-1,2,3-triazolyl)-adenosine-3'-pho sphate
  modified_base 4: mod_base = OTHER; note 2'-O-(1-hexyl-4-methylene-1,2,3-triazolyl)-guanosine-3'-pho sphate
  modified_base 5: mod_base = OTHER; note 2'-O-(1-hexyl-4-methylene-1,2,3-triazolyl)-adenosine-3'-pho sphate
  modified_base 6: mod_base = OTHER; note 2'-O-(1-hexyl-4-methylene-1,2,3-triazolyl)-cytidine-3'-phos phate
  modified_base 7: mod_base = OTHER; note = 2'-fluorocytidine-3'-phosphate
  modified_base 8: mod_base = OTHER; note = 2'-O-methyluridine-3'-phosphate
  modified_base 9: mod_base = OTHER; note = 2'-fluoroguanosine-3'-phosphate
  modified_base 10: mod_base = OTHER; note = 2'-fluorouridine-3'-phosphate
  modified_base 11: mod_base = OTHER; note = 2'-fluorouridine-3'-phosphate
  modified_base 12: mod_base = OTHER; note = 2'-O-methyluridine-3'-phosphate
  modified_base 13: mod_base = OTHER; note = 2'-fluorouridine-3'-phosphate
  modified_base 14: mod_base = OTHER; note 2'-O-(1-hexyl-4-methylene-1,2,3-triazolyl)-guanosine-3'-pho sphate
  modified_base 15: mod_base = OTHER; note = 2'-fluorocytidine-3'-phosphate
  modified_base 16: mod_base = OTHER; note 2'-O-(1-hexyl-4-methylene-1,2,3-triazolyl)-uridine-3'-phosp hate
  modified_base 17: mod_base = OTHER; note = 2'-fluorouridine-3'-phosphate
  modified_base 18: mod_base = OTHER; note 2'-O-(1-hexyl-4-methylene-1,2,3-triazolyl)-uridine-3'-phosp hate
  modified_base 19: mod_base = OTHER; note = 2'-fluorouridine-3'-phosphate
  modified_base 20: mod_base = OTHER; note 2'-O-(1-hexyl-4-methylene-1,2,3-triazolyl)-guanosine-3'-pho sphate
  modified_base 21: mod_base = OTHER; note = 2'-fluorouridine-3'-phosphate N-[tris(GalNAc-alkyl)-amidodecanoyl)]-4-hydroxyprolinol Hyp-(GalNAc-alkyl)3
ctagacctgttttgcttttgt

SEQ ID NO: 672 - RNA, 23 nt, synthetic construct
  source 1..23: mol_type = other RNA; note = Description of Artificial Sequence: Synthetic oligonucleotide
  modified_base 1: mod_base = OTHER; note = 2'-O-methyladenosine-3'-phosphorothioate
  modified_base 2: mod_base = OTHER; note = 2'-fluorocytidine-3'-phosphorothioate
  modified_base 3: mod_base = OTHER; note = 2'-O-methyladenosine-3'-phosphate
  modified_base 4: mod_base = OTHER; note = 2'-fluoroadenosine-3'-phosphate
  modified_base 5: mod_base = OTHER; note = 2'-O-methyladenosine-3'-phosphate
  modified_base 6: mod_base = OTHER; note = 2'-fluoroadenosine-3'-phosphate
  modified_base 7: mod_base = OTHER; note = 2'-O-methylguanosine-3'-phosphate
  modified_base 8: mod_base = OTHER; note = 2'-fluorocytidine-3'-phosphate
  modified_base 9: mod_base = OTHER; note = 2'-O-methyladenosine-3'-phosphate
  modified_base 10: mod_base = OTHER; note = 2'-fluoroadenosine-3'-phosphate
  modified_base 11: mod_base = OTHER; note 2'-O-(1-hexyl-4-methylene-1,2,3-triazolyl)-adenosine-3'-pho sphate
  modified_base 12: mod_base = OTHER; note = 2'-O-methyladenosine-3'-phosphate
  modified_base 13: mod_base = OTHER; note = 2'-O-methylcytidine-3'-phosphate
  modified_base 14: mod_base = OTHER; note = 2'-fluoroadenosine-3'-phosphate
  modified_base 15: mod_base = OTHER; note = 2'-O-methylguanosine-3'-phosphate
  modified_base 16: mod_base = OTHER; note = 2'-fluoroguanosine-3'-phosphate
  modified_base 17: mod_base = OTHER; note = 2'-O-methyluridine-3'-phosphate
  modified_base 18: mod_base = OTHER; note = 2'-fluorocytidine-3'-phosphate
  modified_base 19: mod_base = OTHER; note = 2'-O-methyluridine-3'-phosphate
  modified_base 20: mod_base = OTHER; note = 2'-fluoroadenosine-3'-phosphate
  modified_base 21: mod_base = OTHER; note = 2'-O-methylguanosine-3'-phosphorothioate
  modified_base 22: mod_base = OTHER; note = 2'-O-methyladenosine-3'-phosphorothioate
  modified_base 23: mod_base = OTHER; note = 2'-O-methyladenosine-3'-phosphate
acaaaagcaaaacaggtctagaa

SEQ ID NO: 673 - RNA, 21 nt, synthetic construct
  source 1..21: mol_type = other RNA; note = Description of Artificial Sequence: Synthetic oligonucleotide
  modified_base 1: mod_base = OTHER; note 2'-O-(1-hexyl-4-methylene-1,2,3-triazolyl)-cytidine-3'-phos phate
  modified_base 2: mod_base = OTHER; note = 2'-O-methyluridine-3'-phosphate
  modified_base 3: mod_base = OTHER; note 2'-O-(1-hexyl-4-methylene-1,2,3-triazolyl)-adenosine-3'-pho sphate
  modified_base 4: mod_base = OTHER; note 2'-O-(1-hexyl-4-methylene-1,2,3-triazolyl)-guanosine-3'-pho sphate
  modified_base 5: mod_base = OTHER; note 2'-O-(1-hexyl-4-methylene-1,2,3-triazolyl)-adenosine-3'-pho sphate
  modified_base 6: mod_base = OTHER; note 2'-O-(1-hexyl-4-methylene-1,2,3-triazolyl)-cytidine-3'-phos phate
  modified_base 7: mod_base = OTHER; note = 2'-fluorocytidine-3'-phosphate
  modified_base 8: mod_base = OTHER; note = 2'-O-methyluridine-3'-phosphate
  modified_base 9: mod_base = OTHER; note = 2'-fluoroguanosine-3'-phosphate
  modified_base 10: mod_base = OTHER; note = 2'-fluorouridine-3'-phosphate
  modified_base 11: mod_base = OTHER; note = 2'-fluorouridine-3'-phosphate
  modified_base 12: mod_base = OTHER; note = 2'-O-methyluridine-3'-phosphate
  modified_base 13: mod_base = OTHER; note = 2'-fluorouridine-3'-phosphate
  modified_base 14: mod_base = OTHER; note 2'-O-(1-hexyl-4-methylene-1,2,3-triazolyl)-guanosine-3'-pho sphate
  modified_base 15: mod_base = OTHER; note = 2'-fluorocytidine-3'-phosphate
  modified_base 16: mod_base = OTHER; note 2'-O-(1-hexyl-4-methylene-1,2,3-triazolyl)-uridine-3'-phosp hate
  modified_base 17: mod_base = OTHER; note = 2'-fluorouridine-3'-phosphate
  modified_base 18: mod_base = OTHER; note 2'-O-(1-hexyl-4-methylene-1,2,3-triazolyl)-uridine-3'-phosp hate
  modified_base 19: mod_base = OTHER; note = 2'-fluorouridine-3'-phosphate
  modified_base 20: mod_base = OTHER; note 2'-O-(1-hexyl-4-methylene-1,2,3-triazolyl)-guanosine-3'-pho sphate
  modified_base 21: mod_base = OTHER; note = 2'-fluorouridine-3'-phosphate N-[tris(GalNAc-alkyl)-amidodecanoyl)]-4-hydroxyprolinol Hyp-(GalNAc-alkyl)3
ctagacctgttttgcttttgt

SEQ ID NO: 674 - RNA, 23 nt, synthetic construct
  source 1..23: mol_type = other RNA; note = Description of Artificial Sequence: Synthetic oligonucleotide
  modified_base 1: mod_base = OTHER; note = 2'-O-methyladenosine-3'-phosphorothioate
  modified_base 2: mod_base = OTHER; note = 2'-fluorocytidine-3'-phosphorothioate
  modified_base 3: mod_base = OTHER; note = 2'-O-methyladenosine-3'-phosphate
  modified_base 4: mod_base = OTHER; note = 2'-fluoroadenosine-3'-phosphate
  modified_base 5: mod_base = OTHER; note = 2'-O-methyladenosine-3'-phosphate
  modified_base 6: mod_base = OTHER; note = 2'-fluoroadenosine-3'-phosphate
  modified_base 7: mod_base = OTHER; note = 2'-O-methylguanosine-3'-phosphate
  modified_base 8: mod_base = OTHER; note = 2'-fluorocytidine-3'-phosphate
  modified_base 9: mod_base = OTHER; note = 2'-O-methyladenosine-3'-phosphate
  modified_base 10: mod_base = OTHER; note = 2'-fluoroadenosine-3'-phosphate
  modified_base 11: mod_base = OTHER; note = 2'-O-methyladenosine-3'-phosphate
  modified_base 12: mod_base = OTHER; note 2'-O-(1-hexyl-4-methylene-1,2,3-triazolyl)-adenosine-3'-pho sphate
  modified_base 13: mod_base = OTHER; note = 2'-O-methylcytidine-3'-phosphate
  modified_base 14: mod_base = OTHER; note = 2'-fluoroadenosine-3'-phosphate
  modified_base 15: mod_base = OTHER; note = 2'-O-methylguanosine-3'-phosphate
  modified_base 16: mod_base = OTHER; note = 2'-fluoroguanosine-3'-phosphate
  modified_base 17: mod_base = OTHER; note = 2'-O-methyluridine-3'-phosphate
  modified_base 18: mod_base = OTHER; note = 2'-fluorocytidine-3'-phosphate
  modified_base 19: mod_base = OTHER; note = 2'-O-methyluridine-3'-phosphate
  modified_base 20: mod_base = OTHER; note = 2'-fluoroadenosine-3'-phosphate
  modified_base 21: mod_base = OTHER; note = 2'-O-methylguanosine-3'-phosphorothioate
  modified_base 22: mod_base = OTHER; note = 2'-O-methyladenosine-3'-phosphorothioate
  modified_base 23: mod_base = OTHER; note = 2'-O-methyladenosine-3'-phosphate
acaaaagcaaaacaggtctagaa

SEQ ID NO: 675 - RNA, 21 nt, synthetic construct
  source 1..21: mol_type = other RNA; note = Description of Artificial Sequence: Synthetic oligonucleotide
  modified_base 1: mod_base = OTHER; note 2'-O-(1-hexyl-4-methylene-1,2,3-triazolyl)-cytidine-3'-phos phate
  modified_base 2: mod_base = OTHER; note = 2'-O-methyluridine-3'-phosphate
  modified_base 3: mod_base = OTHER; note 2'-O-(1-hexyl-4-methylene-1,2,3-triazolyl)-adenosine-3'-pho sphate
  modified_base 4: mod_base = OTHER; note 2'-O-(1-hexyl-4-methylene-1,2,3-triazolyl)-guanosine-3'-pho sphate
  modified_base 5: mod_base = OTHER; note 2'-O-(1-hexyl-4-methylene-1,2,3-triazolyl)-adenosine-3'-pho sphate
  modified_base 6: mod_base = OTHER; note 2'-O-(1-hexyl-4-methylene-1,2,3-triazolyl)-cytidine-3'-phos phate
  modified_base 7: mod_base = OTHER; note = 2'-fluorocytidine-3'-phosphate
  modified_base 8: mod_base = OTHER; note = 2'-O-methyluridine-3'-phosphate
  modified_base 9: mod_base = OTHER; note = 2'-fluoroguanosine-3'-phosphate
  modified_base 10: mod_base = OTHER; note = 2'-fluorouridine-3'-phosphate
  modified_base 11: mod_base = OTHER; note = 2'-fluorouridine-3'-phosphate
  modified_base 12: mod_base = OTHER; note = 2'-O-methyluridine-3'-phosphate
  modified_base 13: mod_base = OTHER; note = 2'-fluorouridine-3'-phosphate
  modified_base 14: mod_base = OTHER; note 2'-O-(1-hexyl-4-methylene-1,2,3-triazolyl)-guanosine-3'-pho sphate
  modified_base 15: mod_base = OTHER; note = 2'-fluorocytidine-3'-phosphate
  modified_base 16: mod_base = OTHER; note 2'-O-(1-hexyl-4-methylene-1,2,3-triazolyl)-uridine-3'-phosp hate
  modified_base 17: mod_base = OTHER; note = 2'-fluorouridine-3'-phosphate
  modified_base 18: mod_base = OTHER; note 2'-O-(1-hexyl-4-methylene-1,2,3-triazolyl)-uridine-3'-phosp hate
  modified_base 19: mod_base = OTHER; note = 2'-fluorouridine-3'-phosphate
  modified_base 20: mod_base = OTHER; note 2'-O-(1-hexyl-4-methylene-1,2,3-triazolyl)-guanosine-3'-pho sphate
  modified_base 21: mod_base = OTHER; note = 2'-fluorouridine-3'-phosphate N-[tris(GalNAc-alkyl)-amidodecanoyl)]-4-hydroxyprolinol Hyp-(GalNAc-alkyl)3
ctagacctgttttgcttttgt

SEQ ID NO: 676 - RNA, 23 nt, synthetic construct
  source 1..23: mol_type = other RNA; note = Description of Artificial Sequence: Synthetic oligonucleotide
  modified_base 1: mod_base = OTHER; note = 2'-O-methyladenosine-3'-phosphorothioate
  modified_base 2: mod_base = OTHER; note = 2'-fluorocytidine-3'-phosphorothioate
  modified_base 3: mod_base = OTHER; note = 2'-O-methyladenosine-3'-phosphate
  modified_base 4: mod_base = OTHER; note = 2'-fluoroadenosine-3'-phosphate
  modified_base 5: mod_base = OTHER; note = 2'-O-methyladenosine-3'-phosphate
  modified_base 6: mod_base = OTHER; note = 2'-fluoroadenosine-3'-phosphate
  modified_base 7: mod_base = OTHER; note = 2'-O-methylguanosine-3'-phosphate
  modified_base 8: mod_base = OTHER; note = 2'-fluorocytidine-3'-phosphate
  modified_base 9: mod_base = OTHER; note 2'-O-(1-hexyl-4-methylene-1,2,3-triazolyl)-adenosine-3'-pho sphate
  modified_base 10: mod_base = OTHER; note = 2'-fluoroadenosine-3'-phosphate
  modified_base 11: mod_base = OTHER; note = 2'-O-methyladenosine-3'-phosphate
  modified_base 12: mod_base = OTHER; note = 2'-O-methyladenosine-3'-phosphate
  modified_base 13: mod_base = OTHER; note = 2'-O-methylcytidine-3'-phosphate
  modified_base 14: mod_base = OTHER; note = 2'-fluoroadenosine-3'-phosphate
  modified_base 15: mod_base = OTHER; note 2'-O-(1-hexyl-4-methylene-1,2,3-triazolyl)-guanosine-3'-pho sphate
  modified_base 16: mod_base = OTHER; note = 2'-fluoroguanosine-3'-phosphate
  modified_base 17: mod_base = OTHER; note = 2'-O-methyluridine-3'-phosphate
  modified_base 18: mod_base = OTHER; note = 2'-fluorocytidine-3'-phosphate
  modified_base 19: mod_base = OTHER; note 2'-O-(1-hexyl-4-methylene-1,2,3-triazolyl)-uridine-3'-phosp hate
  modified_base 20: mod_base = OTHER; note = 2'-fluoroadenosine-3'-phosphate
  modified_base 21: mod_base = OTHER; note = 2'-O-methylguanosine-3'-phosphorothioate
  modified_base 22: mod_base = OTHER; note = 2'-O-methyladenosine-3'-phosphorothioate
  modified_base 23: mod_base = OTHER; note = 2'-O-methyladenosine-3'-phosphate
acaaaagcaaaacaggtctagaa

SEQ ID NO: 677 - RNA, 21 nt, synthetic construct
  source 1..21: mol_type = other RNA; note = Description of Artificial Sequence: Synthetic oligonucleotide
  modified_base 1: mod_base = OTHER; note = 2'-fluorocytidine-3'-phosphorothioate
  modified_base 2: mod_base = OTHER; note = 2'-O-methyladenosine-3'-phosphorothioate
  modified_base 3: mod_base = OTHER; note = 2'-fluoroadenosine-3'-phosphate
  modified_base 4: mod_base = OTHER; note = 2'-O-methylguanosine-3'-phosphate
  modified_base 5: mod_base = OTHER; note = 2'-fluorocytidine-3'-phosphate
  modified_base 6: mod_base = OTHER; note = 2'-O-methyladenosine-3'-phosphate
  modified_base 7: mod_base = OTHER; note = 2'-fluoroguanosine-3'-phosphate
  modified_base 8: mod_base = OTHER; note = 2'-O-methyladenosine-3'-phosphate
  modified_base 9: mod_base = OTHER; note = 2'-fluorocytidine-3'-phosphate
  modified_base 10: mod_base = OTHER; note = 2'-fluoroadenosine-3'-phosphate
  modified_base 11: mod_base = OTHER; note = 2'-fluorouridine-3'-phosphate
  modified_base 12: mod_base = OTHER; note = 2'-O-methyluridine-3'-phosphate
  modified_base 13: mod_base = OTHER; note = 2'-fluorouridine-3'-phosphate
  modified_base 14: mod_base = OTHER; note = 2'-O-methyladenosine-3'-phosphate
  modified_base 15: mod_base = OTHER; note = 2'-fluorouridine-3'-phosphate
  modified_base 16: mod_base = OTHER; note = 2'-O-methylcytidine-3'-phosphate
  modified_base 17: mod_base = OTHER; note = 2'-fluorouridine-3'-phosphate
  modified_base 18: mod_base = OTHER; note = 2'-O-methyluridine-3'-phosphate
  modified_base 19: mod_base = OTHER; note = 2'-fluorouridine-3'-phosphate
  modified_base 20: mod_base = OTHER; note = 2'-O-methyluridine-3'-phosphate
  modified_base 21: mod_base = OTHER; note = 2'-fluorouridine-3'-phosphate N-[tris(GalNAc-alkyl)-amidodecanoyl)]-4-hydroxyprolinol Hyp-(GalNAc-alkyl)3
caagcagacatttatcttttt

SEQ ID NO: 678 - RNA, 23 nt, synthetic construct
  source 1..23: mol_type = other RNA; note = Description of Artificial Sequence: Synthetic oligonucleotide
  modified_base 1: mod_base = OTHER; note = 2'-O-methyladenosine-3'-phosphorothioate
  modified_base 2: mod_base = OTHER; note = 2'-fluoroadenosine-3'-phosphorothioate
  modified_base 3: mod_base = OTHER; note = 2'-O-methyladenosine-3'-phosphate
  modified_base 4: mod_base = OTHER; note = 2'-fluoroadenosine-3'-phosphate
  modified_base 5: mod_base = OTHER; note = 2'-O-methyladenosine-3'-phosphate
  modified_base 6: mod_base = OTHER; note = 2'-fluoroguanosine-3'-phosphate
  modified_base 7: mod_base = OTHER; note = 2'-O-methyladenosine-3'-phosphate
  modified_base 8: mod_base = OTHER; note = 2'-fluorouridine-3'-phosphate
  modified_base 9: mod_base = OTHER; note = 2'-O-methyladenosine-3'-phosphate
  modified_base 10: mod_base = OTHER; note = 2'-fluoroadenosine-3'-phosphate
  modified_base 11: mod_base = OTHER; note = 2'-O-methyladenosine-3'-phosphate
  modified_base 12: mod_base = OTHER; note = 2'-O-methyluridine-3'-phosphate
  modified_base 13: mod_base = OTHER; note = 2'-O-methylguanosine-3'-phosphate
  modified_base 14: mod_base = OTHER; note = 2'-fluorouridine-3'-phosphate
  modified_base 15: mod_base = OTHER; note = 2'-O-methylcytidine-3'-phosphate
  modified_base 16: mod_base = OTHER; note = 2'-fluorouridine-3'-phosphate
  modified_base 17: mod_base = OTHER; note = 2'-O-methylguanosine-3'-phosphate
  modified_base 18: mod_base = OTHER; note = 2'-fluorocytidine-3'-phosphate
  modified_base 19: mod_base = OTHER; note = 2'-O-methyluridine-3'-phosphate
  modified_base 20: mod_base = OTHER; note = 2'-fluorouridine-3'-phosphate
  modified_base 21: mod_base = OTHER; note = 2'-O-methylguanosine-3'-phosphorothioate
  modified_base 22: mod_base = OTHER; note = 2'-O-methylcytidine-3'-phosphorothioate
  modified_base 23: mod_base = OTHER; note = 2'-O-methyluridine-3'-phosphate
aaaaagataaatgtctgcttgct

SEQ ID NO: 679 - RNA, 21 nt, synthetic construct
  source 1..21: mol_type = other RNA; note = Description of Artificial Sequence: Synthetic oligonucleotide
  modified_base 1: mod_base = OTHER; note = 2'-fluorocytidine-3'-phosphorothioate
  modified_base 2: mod_base = OTHER; note = 2'-O-methyluridine-3'-phosphorothioate
  modified_base 3: mod_base = OTHER; note = 2'-fluoroadenosine-3'-phosphate
  modified_base 4: mod_base = OTHER; note = 2'-O-methylguanosine-3'-phosphate
  modified_base 5: mod_base = OTHER; note = 2'-fluoroadenosine-3'-phosphate
  modified_base 6: mod_base = OTHER; note = 2'-O-methylcytidine-3'-phosphate
  modified_base 7: mod_base = OTHER; note = 2'-fluorocytidine-3'-phosphate
  modified_base 8: mod_base = OTHER; note = 2'-O-methyluridine-3'-phosphate
  modified_base 9: mod_base = OTHER; note = 2'-fluoroguanosine-3'-phosphate
  modified_base 10: mod_base = OTHER; note = 2'-fluorouridine-3'-phosphate
  modified_base 11: mod_base = OTHER; note = 2'-fluorouridine-3'-phosphate
  modified_base 12: mod_base = OTHER; note = 2'-O-methyluridine-3'-phosphate
  modified_base 13: mod_base = OTHER; note = 2'-fluorouridine-3'-phosphate
  modified_base 14: mod_base = OTHER; note = 2'-O-methylguanosine-3'-phosphate
  modified_base 15: mod_base = OTHER; note = 2'-O-methylcytidine-3'-phosphate
  modified_base 16: mod_base = OTHER; note = 2'-O-methyluridine-3'-phosphate
  modified_base 17: mod_base = OTHER; note = 2'-O-methyluridine-3'-phosphate
  modified_base 18: mod_base = OTHER; note = 2'-O-methyluridine-3'-phosphate
  modified_base 19: mod_base = OTHER; note = 2'-O-methyluridine-3'-phosphate
  modified_base 20: mod_base = OTHER; note = 2'-O-methylguanosine-3'-phosphate
  modified_base 21: mod_base = OTHER; note = 2'-O-methyluridine-3'-phosphate N-[tris(GalNAc-alkyl)-amidodecanoyl)]-4-hydroxyprolinol Hyp-(GalNAc-alkyl)3
ctagacctgttttgcttttgt

SEQ ID NO: 680 - RNA, 23 nt, synthetic construct
  source 1..23: mol_type = other RNA; note = Description of Artificial Sequence: Synthetic oligonucleotide
  modified_base 1: mod_base = OTHER; note = 2'-O-methyladenosine-3'-phosphorothioate
  modified_base 2: mod_base = OTHER; note = 2'-fluorocytidine-3'-phosphorothioate
  modified_base 3: mod_base = OTHER; note = 2'-O-methyladenosine-3'-phosphate
  modified_base 4: mod_base = OTHER; note = 2'-fluoroadenosine-3'-phosphate
  modified_base 5: mod_base = OTHER; note = 2'-O-methyladenosine-3'-phosphate
  modified_base 6: mod_base = OTHER; note = 2'-O-methyladenosine-3'-phosphate
  modified_base 7: mod_base = OTHER; note = 2'-O-methylguanosine-3'-phosphate
  modified_base 8: mod_base = OTHER; note = 2'-fluorocytidine-3'-phosphate
  modified_base 9: mod_base = OTHER; note = 2'-O-methyladenosine-3'-phosphate
  modified_base 10: mod_base = OTHER; note = 2'-fluoroadenosine-3'-phosphate
  modified_base 11: mod_base = OTHER; note = 2'-O-methyladenosine-3'-phosphate
  modified_base 12: mod_base = OTHER; note = 2'-O-methyladenosine-3'-phosphate
  modified_base 13: mod_base = OTHER; note = 2'-O-methylcytidine-3'-phosphate
  modified_base 14: mod_base = OTHER; note = 2'-fluoroadenosine-3'-phosphate
  modified_base 15: mod_base = OTHER; note = 2'-O-methylguanosine-3'-phosphate
  modified_base 16: mod_base = OTHER; note = 2'-fluoroguanosine-3'-phosphate
  modified_base 17: mod_base = OTHER; note = 2'-O-methyluridine-3'-phosphate
  modified_base 18: mod_base = OTHER; note = 2'-O-methylcytidine-3'-phosphate
  modified_base 19: mod_base = OTHER; note = 2'-O-methyluridine-3'-phosphate
  modified_base 20: mod_base = OTHER; note = 2'-fluoroadenosine-3'-phosphate
  modified_base 21: mod_base = OTHER; note = 2'-O-methylguanosine-3'-phosphorothioate
  modified_base 22: mod_base = OTHER; note = 2'-O-methyladenosine-3'-phosphorothioate
  modified_base 23: mod_base = OTHER; note = 2'-O-methyladenosine-3'-phosphate
acaaaagcaaaacaggtctagaa

SEQ ID NO: 681 - RNA, 21 nt, synthetic construct
  source 1..21: mol_type = other RNA; note = Description of Artificial Sequence: Synthetic oligonucleotide
  modified_base 1: mod_base = OTHER; note = 2'-O-methylcytidine-3'-phosphorothioate
  modified_base 2: mod_base = OTHER; note = 2'-O-methyluridine-3'-phosphorothioate
  modified_base 3: mod_base = OTHER; note = 2'-O-methyladenosine-3'-phosphate
  modified_base 4: mod_base = OTHER; note = 2'-O-methylguanosine-3'-phosphate
  modified_base 5: mod_base = OTHER; note = 2'-O-methyladenosine-3'-phosphate
  modified_base 6: mod_base = OTHER; note = 2'-O-methylcytidine-3'-phosphate
  modified_base 7: mod_base = OTHER; note = 2'-fluorocytidine-3'-phosphate
  modified_base 8: mod_base = OTHER; note = 2'-O-methyluridine-3'-phosphate
  modified_base 9: mod_base = OTHER; note = 2'-fluoroguanosine-3'-phosphate
  modified_base 10: mod_base = OTHER; note = 2'-O-methyluridine-3'-phosphate
  modified_base 11: mod_base = OTHER; note = 2'-O-methyluridine-3'-phosphate
  modified_base 12: mod_base = OTHER; note = 2'-O-methyluridine-3'-phosphate
  modified_base 13: mod_base = OTHER; note = 2'-O-methyluridine-3'-phosphate
  modified_base 14: mod_base = OTHER; note = 2'-O-methylguanosine-3'-phosphate
  modified_base 15: mod_base = OTHER; note = 2'-O-methylcytidine-3'-phosphate
  modified_base 16: mod_base = OTHER; note = 2'-O-methyluridine-3'-phosphate
  modified_base 17: mod_base = OTHER; note = 2'-O-methyluridine-3'-phosphate
  modified_base 18: mod_base = OTHER; note = 2'-O-methyluridine-3'-phosphate
  modified_base 19: mod_base = OTHER; note = 2'-O-methyluridine-3'-phosphate
  modified_base 20: mod_base = OTHER; note = 2'-O-methylguanosine-3'-phosphate
  modified_base 21: mod_base = OTHER; note = 2'-O-methyluridine-3'-phosphate N-[tris(GalNAc-alkyl)-amidodecanoyl)]-4-hydroxyprolinol Hyp-(GalNAc-alkyl)3
ctagacctgttttgcttttgt

SEQ ID NO: 682 - RNA, 23 nt, synthetic construct
  source 1..23: mol_type = other RNA; note = Description of Artificial Sequence: Synthetic oligonucleotide
  modified_base 1: mod_base = OTHER; note = 2'-O-methyladenosine-3'-phosphorothioate
  modified_base 2: mod_base = OTHER; note = 2'-fluorocytidine-3'-phosphorothioate
  modified_base 3: mod_base = OTHER; note = 2'-O-methyladenosine-3'-phosphate
  modified_base 4: mod_base = OTHER; note = 2'-fluoroadenosine-3'-phosphate
  modified_base 5: mod_base = OTHER; note = 2'-O-methyladenosine-3'-phosphate
  modified_base 6: mod_base = OTHER; note = 2'-O-methyladenosine-3'-phosphate
  modified_base 7: mod_base = OTHER; note = 2'-O-methylguanosine-3'-phosphate
  modified_base 8: mod_base = OTHER; note = 2'-fluorocytidine-3'-phosphate
  modified_base 9: mod_base = OTHER; note = 2'-O-methyladenosine-3'-phosphate
  modified_base 10: mod_base = OTHER; note = 2'-fluoroadenosine-3'-phosphate
  modified_base 11: mod_base = OTHER; note = 2'-O-methyladenosine-3'-phosphate
  modified_base 12: mod_base = OTHER; note = 2'-O-methyladenosine-3'-phosphate
  modified_base 13: mod_base = OTHER; note = 2'-O-methylcytidine-3'-phosphate
  modified_base 14: mod_base = OTHER; note = 2'-fluoroadenosine-3'-phosphate
  modified_base 15: mod_base = OTHER; note = 2'-O-methylguanosine-3'-phosphate
  modified_base 16: mod_base = OTHER; note = 2'-fluoroguanosine-3'-phosphate
  modified_base 17: mod_base = OTHER; note = 2'-O-methyluridine-3'-phosphate
  modified_base 18: mod_base = OTHER; note = 2'-O-methylcytidine-3'-phosphate
  modified_base 19: mod_base = OTHER; note = 2'-O-methyluridine-3'-phosphate
  modified_base 20: mod_base = OTHER; note = 2'-fluoroadenosine-3'-phosphate
  modified_base 21: mod_base = OTHER; note = 2'-O-methylguanosine-3'-phosphorothioate
  modified_base 22: mod_base = OTHER; note = 2'-O-methyladenosine-3'-phosphorothioate
  modified_base 23: mod_base = OTHER; note = 2'-O-methyladenosine-3'-phosphate
acaaaagcaaaacaggtctagaa

SEQ ID NO: 683 - RNA, 21 nt, synthetic construct
  source 1..21: mol_type = other RNA; note = Description of Artificial Sequence: Synthetic oligonucleotide; note = Description of Combined DNA/RNA Molecule: Synthetic oligonucleotide
  modified_base 1: mod_base = OTHER; note = 2'-O-methylcytidine-3'-phosphorothioate
  modified_base 2: mod_base = OTHER; note = 2'-O-methyluridine-3'-phosphorothioate
  modified_base 3: mod_base = OTHER; note = 2'-O-methyladenosine-3'-phosphate
  modified_base 4: mod_base = OTHER; note = 2'-O-methylguanosine-3'-phosphate
  modified_base 5: mod_base = OTHER; note = 2'-O-methyladenosine-3'-phosphate
  modified_base 6: mod_base = OTHER; note = 2'-O-methylcytidine-3'-phosphate
  modified_base 7: mod_base = OTHER; note = 2'-fluorocytidine-3'-phosphate
  modified_base 8: mod_base = OTHER; note = 2'-O-methyluridine-3'-phosphate
  modified_base 9: mod_base = OTHER; note = 2'-fluoroguanosine-3'-phosphate
  modified_base 10: mod_base = OTHER; note = 2'-O-methyluridine-3'-phosphate
  modified_base 12: mod_base = OTHER; note = 2'-O-methyluridine-3'-phosphate
  modified_base 13: mod_base = OTHER; note = 2'-O-methyluridine-3'-phosphate
  modified_base 14: mod_base = OTHER; note = 2'-O-methylguanosine-3'-phosphate
  modified_base 15: mod_base = OTHER; note = 2'-O-methylcytidine-3'-phosphate
  modified_base 16: mod_base = OTHER; note = 2'-O-methyluridine-3'-phosphate
  modified_base 17: mod_base = OTHER; note = 2'-O-methyluridine-3'-phosphate
  modified_base 18: mod_base = OTHER; note = 2'-O-methyluridine-3'-phosphate
  modified_base 19: mod_base = OTHER; note = 2'-O-methyluridine-3'-phosphate
  modified_base 20: mod_base = OTHER; note = 2'-O-methylguanosine-3'-phosphate
  modified_base 21: mod_base = OTHER; note = 2'-O-methyluridine-3'-phosphate N-[tris(GalNAc-alkyl)-amidodecanoyl)]-4-hydroxyprolinol Hyp-(GalNAc-alkyl)3
  misc_feature 1..10: note = RNA
  misc_feature 11: note = DNA
  misc_feature 12..21: note = RNA
ctagacctgttttgcttttgt

SEQ ID NO: 684 - RNA, 23 nt, synthetic construct
  source 1..23: mol_type = other RNA; note = Description of Artificial Sequence: Synthetic oligonucleotide
  modified_base 1: mod_base = OTHER; note = 2'-O-methyladenosine-3'-phosphorothioate
  modified_base 2: mod_base = OTHER; note = 2'-fluorocytidine-3'-phosphorothioate
  modified_base 3: mod_base = OTHER; note = 2'-O-methyladenosine-3'-phosphate
  modified_base 4: mod_base = OTHER; note = 2'-fluoroadenosine-3'-phosphate
  modified_base 5: mod_base = OTHER; note = 2'-fluoroadenosine-3'-phosphate
  modified_base 6: mod_base = OTHER; note = 2'-fluoroadenosine-3'-phosphate
  modified_base 7: mod_base = OTHER; note = 2'-O-methylguanosine-3'-phosphate
  modified_base 8: mod_base = OTHER; note = 2'-fluorocytidine-3'-phosphate
  modified_base 9: mod_base = OTHER; note = 2'-O-methyladenosine-3'-phosphate
  modified_base 10: mod_base = OTHER; note = 2'-fluoroadenosine-3'-phosphate
  modified_base 11: mod_base = OTHER; note = 2'-O-methyladenosine-3'-phosphate
  modified_base 12: mod_base = OTHER; note = 2'-fluoroadenosine-3'-phosphate
  modified_base 13: mod_base = OTHER; note = 2'-O-methylcytidine-3'-phosphate
  modified_base 14: mod_base = OTHER; note = 2'-fluoroadenosine-3'-phosphate
  modified_base 15: mod_base = OTHER; note = 2'-O-methylguanosine-3'-phosphate
  modified_base 16: mod_base = OTHER; note = 2'-fluoroguanosine-3'-phosphate
  modified_base 17: mod_base = OTHER; note = 2'-O-methyluridine-3'-phosphate
  modified_base 18: mod_base = OTHER; note = 2'-fluorocytidine-3'-phosphate
  modified_base 19: mod_base = OTHER; note = 2'-O-methyluridine-3'-phosphate
  modified_base 20: mod_base = OTHER; note = 2'-O-methyladenosine-3'-phosphate
  modified_base 21: mod_base = OTHER; note = 2'-O-methylguanosine-3'-phosphorothioate
  modified_base 22: mod_base = OTHER; note = 2'-O-methyladenosine-3'-phosphorothioate
  modified_base 23: mod_base = OTHER; note = 2'-O-methyladenosine-3'-phosphate
acaaaagcaaaacaggtctagaa

SEQ ID NO: 685 - RNA, 23 nt, synthetic construct
  source 1..23: mol_type = other RNA; note = Description of Artificial Sequence: Synthetic oligonucleotide
acaaaagcaaaacaggtctagaa

SEQ ID NO: 686 - RNA, 21 nt, synthetic construct
  source 1..21: mol_type = other RNA; note = Description of Artificial Sequence: Synthetic oligonucleotide
  misc_difference 11: note = thymidine; note = Description of Combined DNA/RNA Molecule: Synthetic oligonucleotide
ctagacctgttttgcttttgt

SEQ ID NO: 687 - RNA, 21 nt, synthetic construct
  source 1..21: mol_type = other RNA; note = Description of Artificial Sequence: Synthetic oligonucleotide; note = Description of Combined DNA/RNA Molecule: Synthetic oligonucleotide
  modified_base 1: mod_base = OTHER; note = 2'-O-methylcytidine-3'-phosphorothioate
  modified_base 2: mod_base = OTHER; note = 2'-O-methyluridine-3'-phosphorothioate
  modified_base 3: mod_base = OTHER; note = 2'-O-methyladenosine-3'-phosphate
  modified_base 4: mod_base = OTHER; note = 2'-O-methylguanosine-3'-phosphate
  modified_base 5: mod_base = OTHER; note = 2'-O-methyladenosine-3'-phosphate
  modified_base 6: mod_base = OTHER; note = 2'-O-methylcytidine-3'-phosphate
  modified_base 7: mod_base = OTHER; note = 2'-fluorocytidine-3'-phosphate
  modified_base 8: mod_base = OTHER; note = 2'-O-methyluridine-3'-phosphate
  modified_base 9: mod_base = OTHER; note = 2'-fluoroguanosine-3'-phosphate
  modified_base 10: mod_base = OTHER; note = 2'-O-methyluridine-3'-phosphate
  modified_base 12: mod_base = OTHER; note = 2'-O-methyluridine-3'-phosphate
  modified_base 13: mod_base = OTHER; note = 2'-O-methyluridine-3'-phosphate
  modified_base 14: mod_base = OTHER; note = 2'-O-methylguanosine-3'-phosphate
  modified_base 15: mod_base = OTHER; note = 2'-O-methylcytidine-3'-phosphate
  modified_base 16: mod_base = OTHER; note = 2'-O-methyluridine-3'-phosphate
  modified_base 17: mod_base = OTHER; note = 2'-O-methyluridine-3'-phosphate
  modified_base 18: mod_base = OTHER; note = 2'-O-methyluridine-3'-phosphate
  modified_base 19: mod_base = OTHER; note = 2'-O-methyluridine-3'-phosphate
  modified_base 20: mod_base = OTHER; note = 2'-O-methylguanosine-3'-phosphate
  modified_base 21: mod_base = OTHER; note = 2'-O-methyluridine-3'-phosphate
  misc_feature 1..10: note = RNA
  misc_feature 11: note = DNA
  misc_feature 12..21: note = RNA
ctagacctgttttgcttttgt

SEQ ID NO: 688 - RNA, 23 nt, synthetic construct
  source 1..23: mol_type = other RNA; note = Description of Artificial Sequence: Synthetic oligonucleotide
  modified_base 1: mod_base = OTHER; note = 2'-O-methyladenosine-3'-phosphorothioate
  modified_base 2: mod_base = OTHER; note = 2'-fluorocytidine-3'-phosphorothioate
  modified_base 3: mod_base = OTHER; note = 2'-O-methyladenosine-3'-phosphate
  modified_base 4: mod_base = OTHER; note = 2'-fluoroadenosine-3'-phosphate
  modified_base 5: mod_base = OTHER; note = 2'-fluoroadenosine-3'-phosphate
  modified_base 6: mod_base = OTHER; note = 2'-fluoroadenosine-3'-phosphate
  modified_base 7: mod_base = OTHER; note = 2'-O-methylguanosine-3'-phosphate
  modified_base 8: mod_base = OTHER; note = 2'-fluorocytidine-3'-phosphate
  modified_base 9: mod_base = OTHER; note = 2'-O-methyladenosine-3'-phosphate
  modified_base 10: mod_base = OTHER; note = 2'-fluoroadenosine-3'-phosphate
  modified_base 11: mod_base = OTHER; note = 2'-O-methyladenosine-3'-phosphate
  modified_base 12: mod_base = OTHER; note = 2'-fluoroadenosine-3'-phosphate
  modified_base 13: mod_base = OTHER; note = 2'-O-methylcytidine-3'-phosphate
  modified_base 14: mod_base = OTHER; note = 2'-fluoroadenosine-3'-phosphate
  modified_base 15: mod_base = OTHER; note = 2'-O-methylguanosine-3'-phosphate
  modified_base 16: mod_base = OTHER; note = 2'-fluoroguanosine-3'-phosphate
  modified_base 17: mod_base = OTHER; note = 2'-O-methyluridine-3'-phosphate
  modified_base 18: mod_base = OTHER; note = 2'-fluorocytidine-3'-phosphate
  modified_base 19: mod_base = OTHER; note = 2'-O-methyluridine-3'-phosphate
  modified_base 20: mod_base = OTHER; note = 2'-O-methyladenosine-3'-phosphate
  modified_base 21: mod_base = OTHER; note = 2'-O-methylguanosine-3'-phosphorothioate
  modified_base 22: mod_base = OTHER; note = 2'-O-methyladenosine-3'-phosphorothioate
  modified_base 23: mod_base = OTHER; note = 2'-O-methyladenosine-3'-phosphate
acaaaagcaaaacaggtctagaa
